United States Patent Application Publication US 2019/0183130 A1 - sequence listing, part 15

SEQ ID NO: 2 - DNA, 21303856 bp, Cryptococcus oierenis (residues 7,746,861-9,683,575 of 21,303,856)
acggtcaattctttgttaggcgaccgataagggagtcgcggtccagtgatgtacaactcacagactacccagacccaaaggatctgtccaacccagaacccggcaaacttgaagaagtgagacctaatatcgtcgaaacgaccgtcggctaaggcaagcaccaggaaatgaggtgagccaggttttggagcctaacattactggttgaaaatacttactaccagtcttaagaacgcggaagagcaggaacccggccaatcgagcggcccagagcatttggaagacggaagcactgtaagcaaggaagccgttaggacgagagaagatcgcgacgaatggcaatatttctcacacaatatttcttgcgtaaaaggcttagctcaaaagcaagagcaggtgaccgagatgacaatcagcttcggacggtaaaatacttcaaagcagaattctcactgtttcccatcaacagcgtcgccagcgctaaagcgatcgaaaacatcgtaaggtttaacatcagtattggtgccgaaacacatcgagcacgatgactgaccgaggacgaagaagttcgagccgccctgccgatgtcagaatgagatgtcagatgagcagagacgcagtgacgcctgctggctggcttacggtgaagctggcaagaagaagtgggtgaaattagtgaaggaagccgacgcttttctatgcatcgtagtacgcactcggtaatcttgtcaaactgttgcagttgaacatggcaaagtatagacagggctcggttgagatcggtccatgcatttcagtgccgacacgaccatcacttgcctgcaaagtccaagcgatgaagaagccgagacattgccatccaaccgttatgaggagtgtaataaccaggtagtactggtcaataacaaaggcaaccattgtagccgtgttgaacgcttgtccagttgttcggatgcgtgaatccgggacgaagatgagtatcggtatagttcctataccgaacgcgattcgaatctggatcgaggttcgcttgccagggcgaatcgaaagaaattggtctttaagtacggatcgagatttccgactacctattcaagtactcagacacgatcgagcgacgtcgttcgttctttgacatttgagcgatctcatgcttgaaagcggggacgggcatatcttcgtcgatcgccgtgtgatcggcgaaaacggcagggcgagacagagtgagattgtttattttgtggagtcacggcacgatgacgcaagtggcgactaattcgctcgctcgctgtttcccctccccggctctgccccggggatttcgctgccaaggctacaccacatccacaatgcgtcgtttcgcgcagccagaccaggcctgaattctcatgcagtagtaaatattgcgtattatatggtttgggcggcgagcttcgtgtgaggccatatcccgtttcattaggatacaaggatgaagaccaagaactgagaagcgcgatgtaaccaagccgaatagctgactgagtaggggctttggagatcgagcttcgaatactcacgaagataataagaacaccgaaaatcttgagcataagccaccggttggaagtgattgaggcgtagtacttgaggagctcccgttgggctcccgtcacattcctggtgttccggcatgtaccaatggtcacgatgagcgatagacattccatgtcgggctggctctggacacttacgctgagatatcagtcacatccgcatcgattctctgaaccatctctccttgttgctgaaccatgcccgccaactgctggaagatctgtcctaattccgcgattgtgctttcgatcccctcgatcgccgtgctacgcgattgtatatagtcatcttgtcgatcgaggacgagctcctgctgcatctgtccacctccagctagcccgctcccaggaccgcctttctcagacatgtccagtgccaaaaagtcggatgacgggttgacggagccagacaaaggggacgaggaagggtatgctcgacccttgcctttacgatcggtaggttgcaacaagccagaacttgacagtgaagcactcgactgcgaattcgagttgaacaagacggaatctagaaatgcggccaaatcaagtgcatcagcaaagtggatgtctcgatagcaaagctttgaccaactttgtgaaggtggtgcaatcgccgctgatgaagctgtgtgcataaattgctctgtccgatctttactggctttcatgttctggcggattgacatagagatgaagagggtcagaacgagtcgcacagagcgactaacagatcccggcttacttgtgtacgcagctccaggacatccttgaatccaactccaacattggccaagcggctctgaagcatcattacgacgttgttgttgtgctcatccactacgcccttctgcttcccctgattagcagatgacgattgagaatccttcttttgttgaatgacaaagctctgaagttgtgcaatttgcgagttgagagaagagatgtcttgtcggatgatataagtcaattcagaaatctcgaccggccgatcgtcaaacaaggtcttccgcttggcaactgggcagaatagacggtggattcagcgaaatgagagcgatactgatgaatgggacatacgctgtgccagcttctgcagcttccccatagtcagcgtcagatctttgctgatctgaccagccattctcgcaaattcgctcttctgcccctccttgtttacacctctggatcctcgaccatccccgtttaacagcagattctgcttggcagaatcatgaccgctgcctataggtatcgatccgttcaccggagcgatagacgtccgagtacggttgcgaattgaagaaagagtggctcggaactccggcgtgcgatctcgggccataacgtgtcgaacttgattgcgggattctgagacaacgctatagatttggatatagaagagccagccaatagagttgctggtgaaatgagtgtgggtatcgcttttatggttctgttcgagaggagacgggtgggatcgtccatatcggattgtaatcatttcaacatcacaaaggctggtaggtcctgccacggcggaccccggacgcgagactgacatttaaccgttttgttgcatcagctcgtgtctaattgtctaattgcctaacgaaatacggaatggtatgatacgtctgaccgatctataaacatgacacggccgggagatcggccttcgcagctacaacacaacaaggccgtcggtcgtatgtaccggttccggaagaggaaactgtttgattttggggacagacagctcggagatactgccttgcgattcctcccgaagcgctcgaaccacctcattgctgaaggagcggtaagcagacctttgcgatcccttgcgaagactgatgagctatacatgagagaaagagttcagctgttcagctgagttgaggctgtagcggtcgaggaatgcacccacagaataattctgctgcatggttgcaagtatgtagttgacgcagcggtaaacgaaagctttgctagaagccgcagtattgcccgctcgcagagcagtattagcattgttaaaaaatcctacgccagcgtgacaccagtggtcagcaacaaaaacacgcattcataagaagcagccattacccactcttcaaaatcggcaaacgattctccgagtatcctgctcgatccagaggttgcgaagcgttcgaccatgcttctttgaacaagtagtgaccctggttggagagatccagcagaaccgtcgagacaaaagtcggctcaatagtgaattggtgcgcgaccaacgcttgcaggagaagcagaacgaaggtttcggaaaatatctgaattgtcaacatcgttagcgagtcggtatctggttcaaatagctgttcgcatgctacgcaccgaaacaaccggcggatcgagttgtgccacgttgagcatgaagttcatgccgacttgacgtttgccaacttcgtctcccaggcgttcccacgattcttgtccatacgctaggtacgtatcccaatcctggacgacggagtcaaatcagcctcagccctgcttcgaggatcgtaatcgactgactcgtaagtggtgatctactactagcacactagcacattccgcccagcagcgagtcaatgctgatatgtacagctgtcggtctgcctgggtttgaactgaagattgctgttgccatgatccagtcatcgtattagatagcaatgcgtaaataccgggcgaaatcgaatctgcaatgatctggaaaagtattaaaggtgaggacagcggcagacagccataacaacgtctactgaccggcgcgactttcgcatccagataagcctctggagcgataactgctcccgcttcatcgattgccagcaggtcagcatcagtgaagtcgaggcccatcgcgctgtattcgctctgctgggactcttcggttgagccgtccggcacgattcgtttcctcttcgacctggcgggcaaagccgaggcccttgcgtcgagaaaactctgcacacaggcaacgacctctaatccggccctgcgatcgacaactaactccgtcgatcgcagtctttgtgtccagcctgattgaaaaaagaaaatatgcagacaacgctgactgtcagcgatggggcactaaatttctgccgcatcggccagaggagctcacagggagccagtagttcagggtcaggaaacttgcgccctgtctctacgttgtcgtcaaaagattgagtgttgatcaaggtcttgaaacagctgactatcagcacaagtagccggccatgctcaaggatagcgtttccccccccatgcgttgcttccagccgggatttggcccgttgaatggtctcgaagtgtctcgacaactcctctacaatcccagaaagcgattccccatggtgacgagcggcaacgccaagatacatcaatccgcgaatgcatgtcctgcgactttcgatatcggctgaggcgaaatcgatccacttccgcgtattccctagcagaaatggcaggagagtgatgtcgaaaatggccgcaatgattgcagtactaaagcgattgatcaaagcactcaactgcctgtccgttggtaccttgccttcgcgaaatcggaccgggctgaaaggtacgatcgagagcataagccttttgacgtcagctgccgctcgttttgcttcattcaagtcaggtggtatagtgacgatatcggatgcacataggcagaccagctgaaggtagagattataggcagattcctccatgtctatctcttcggccaaagtccgattgaaccgccgaatgaaaacgggaaagtccgcataggtctcgttaggtagtcctcgcaaagccctctcgcggaagacagcccctaggtctttcgtggcgatgttgaagctttcgcgatcgcaatgccatcgccatacgcttgtcagttgtaagcagcggataaccatgatcttgatatacttgtcgcgaggtttgagctgatgccgctttcgcacttcttcctcctcggtatatgagctgatcttgacggcgttcagagcttttcgcacaaggtgccaccgggtcgaaacagataggttaggaggaactttgcccgagggatcgaactgggataaggcagtcagaccgagagtcaggtaccagattcgctcgcttgctcgtggaccgatgtgcctcccctcaaaagctcgatccagagcctggtcaatgcagtgatgtatcgttgaaaattcccgtattccagaggctacgttggcttcccaacattctgccaagtgaagaacgctaacccagcattcagctgagaagtcatcgattattccgtcttccgcttcgaaattcattatcgccttcaatggcttcatcgtgcggtcaaagccataccgtagtaagccttccagtacttcggtcaattgctggacgaccgatgcttcgtaatcataggcagtaggcatctccagcttactatcggcttgggagagaatcatccaggcgatagcgaggtagagcttgatcttgaggagaaagaaggcttgcgagcgattctttgctgttcgaggtaccggactctccttcaattggatgccgaaagattgaatcgccatttgcacttggcgcaaatccccgtcgttccatacgccgttggcaatgtaagagacgatgaacgagaccgcgtccggcgctggcgatgctgatgggtctagtcgatcgttcatgacgtgcaagacttcatctcgaaccttgtcaaaggcgataggtaagatggcgatgaatgcggcaggctccatcgacggttcaaacgatagacccattgcatcgatgcctgcttcgtgcgagagtctgcattcgttgtttaatgcactgatatatctctgcagcttccctgcaccaacgaacgatgtcgggctaaactctacccccgtgtgcaaaggcttgattgcgaaatctatttgaaaatcctgcaactcgtcccacatatcagagacttcgggaatcggtatgggcctgctcggcgatatcgcctgcagaatctcctgctcattcctgataccggatctagcaggggatgcactgttgcgagctgcgagcttagtgtttgtcagcgccaaggaggttctagcgaaagttcgtttttcaactgaagggtccttcggcgaggaatggggtaccgggcgagttcgtgtcccagcattcggttccaattcgaatatcgtctgatcatccaagacttttcttttgattcgtggccttttcgcataagccttggttggttgaacagcatttcggaccgatgcagcgttctgtggaggccttcgtgcctggttcatccgtttactccccataccagctcgggaacgcctgaaaagcgtggtcgatctggtcttagctagcaacatgctgtcacgggtcttgtgaaggccatgaagaaggcttgcaaagtctccggcttggaactgtcgctgccgttcatgccgatattggctcgcatcagaggattgcccggtatcactctcgccctcagtcgcttcctccccttcgctactactgaataccacgatcataggatcaggtggctcggccaaggcatagtgaggagtctcgtcttcccccgtcagcgcagggtcgtcatcaaacaacccttctacaccttgtcggagtgaggggccttttgtttttcgtcggacggcttgaccgggacggattcttagggagtcctcgatctctttgtctttcaaagccttacgtcgctgtcgcgcttgataatccgcctctgccttgtcggccagccttttcgctaagagcgccggcattactcgcttcagagctttgactttttctcttggtccgtcctcttcgccattcgaattcgagctcgaactcgaacccaaggacgttactgaaagtggcgtagcagcatggatagtccggctggaggagatcggtatgggaggatccggaggcgagctgaaggtagagtccaccatgtcgttcctcatcgagataaagccgccattgtcaaaggaatttgcgaagccatcccaaacagagccatcatcgagtccagcgtttgaagcttccgcttcccgttgcgtgctggtcatgcgattctcaaatttctcctcataaccgttattttgatcgctcattccagactcggacgattgagcgcgcctgactagtctacggcgttttgagattggctgaacatcgtcttcaagctcggggctgtcctcttgcagagttggcctcttgttggcacgctgtcttggtacaggtcgtccagctcgggcagcttgcgcagcttctcgattctttgcagcatcttctcgttggcgcgccttttcggctcgtaatttccgcttttcttccttctcctctgatcgcgcgagacgttctctttccttaatctctcgttctacaaaggccatgtactgctgggcttgtttctcctctctcgcctttcgcctgacctctaggcgttcccgctttatcctggtcttggcgagctcttgcaaacgcggatctgatgcttcatctgctacttccccatagaactggaaatgatcagcataatcctgatcgctaggcgataccaacggagagactgtcatatcaatctcgggctcttctggaacctcttcctctccgcgaaattggctgtctgtggcctcttgtagacttgaagcgagaacggcccgatcagggtcgtcatgtagaagctccgcaatcaagagcctgccgcccttgcggaccatcgctctgtacttggttttctcgcgggtatatggctgtagctgaatcgctgtgcgtgtccgaaaagttcgagcgttctgaaatgccaacagagctggatcgagctcgggcggatcttgtggtatggtctcgagtgttgggacaaatcccgccggccttggcgacagtctatggtccggaggcgtggccggggcaggagtcaagcttggcgacctcgtgcgggctcgtggcagagaaccacttggtcttataggcgagcctgaggggccatcggtgacacctctgataggggacacacgagcacttatcgagacgctttggaatatgtctgtagaatccgttaccatatcgaccatgatggtgtcgagttgaggatcgacattcagatcaccttcaggcgccatccagatatcatgagcagcttctcggtctgcgttatcctgggacacctccgttgtaatggagtcgacggcagcgtctgatggcagcgtaaactggtcggcattggtcgagccattgtcatcagatggttttgtagattcggcgtggccggtcatgatgctagaatcgattcccggaggggctgcatcgagaagctctttgggtgacgtcgaaatgaagcccgacgaatcgatctctagacggggcgaaagttcgcctaggtggcaagacggcgatttcgtcctctcctcgatcgtaccgcccggactcgggggaatgttgcgccccagcgtcgtaataccgtcaacgggcaacccggtaacttcgtgacagatttcctccgacagtccatcgaccatattgttgtctgggatgaacagctcgattgtctcggtatggcgacttcctgctggatctccatcgctcggccgtgtcaaggaatcgacgattaagctgtgagcgtgtgcgaatggagtatcaggcaaagattcgaaaagtgcttcttccgagtatggtaaaatgagcatgtgagcttgtgagtaccctattcggcacatcagtgaagaacggcacgtaccgactgcttcggttctgacactcgattcagcccgcttgccaactgtgatcctgttccatggttcgcttctacttctcaagtaaacctcccagcctttcgatcgaatggattcctcgtgagcttcctcccagtcagatgtcggtacggtctcggacggagctgcaggcgatattgagacctgcgcatcgttgaacgttatcgatagctttgatttcttgcgtgacctcgccttaggcaacaaggcgagagggtcttcgtcgtcggagtcgtccatcgcatggccgacctagtttcgacagtatagtccgagacacgatactcgtcctaaggttgccttcatgtgctaggtgaaccgaatttctagagccggaaacttgatattagccaaggttcggtatcgaccacgacgtttatggattttgataactggatagaactggggaagttcaggagttctataaatttatagctttgtcaacctcagaccaagactcgaagttgttcgtcggtcgctaattgctaataactgatcggcttcgcccgcgcgctccgtgccgataaatcattttggtagattttgcacatgctcatcccagcaataccaaggtgcaatatctggtcaaagcggccagaaaagaggtctcaaaggccaatgatatggagatcgagaagacggatgggtatcagtggtgaagccggcgcacgcaggtcgacatggtcgcccttggcggcggtggctccggttctttatttgaacggacccggatgtcatctatcggaatactagtgttgtcatctcgagagtacagcaaacgtttacaacacggtggcgggtgcgtccgttcacgatcaccagttggcaagcatctcccgacctcgaccgttcgggaccacctcgcgctcttcctcgacttcgtattcgacgtcgaccctgggcatttctgagcagagagacgggatagcaagtcagcaatctcttgggaaagcagttacagagatcggacaacaggcttcttactctttcccttcgcactgccctcagtcgcagatgagccttttcgcttgaccccactgaacttgtctggtcgactctgcttggcgacaggagcttcgtcttccgagtccgactcctcctcggaatcggcttcgctctgtatggccgtaggcgcgtcgggtgtcagaacgagccgaacatggacgagattgctataactcacatcgtccgaaccgtcatcgtaatcctccatatccatctcgtcttcactgccgctgaagtcttccacgaattccctatctccaccttcatactcttcctccaactcttcttcctcgtcgccactctcgaattcttcctcgctctcgtccgtcaacatctccagctcctcctcgccctccttgttcttggcttttcgctcgttgtccaagactgctcgccagacgtcctcgttgacgttcaaaggcgcatctccgtaagccttggactttagacgagccaatagctccttctcgatggccttttcaagatgagcagccttgagagctttggcttcccgggttcgctctcttcgatccagctttttcttgatcccgacgagcttgggtctatccatagtaggagactaagacgatgctgctggatctgcatctcgagcgagagcgactcactgttgggtaagactcagtctcctcattttgatcaagtattgcgtgattttggtgattctctgtttacatttgtgcgttacgaagtttggccagtagatgagctcgttgtcgatctgatatcaaagcacatcgtgggacaaattcgtaaaacgtcagcatgaccggacgatatcgactatcacaggcatcttacctgctccagcgctttagcgtagttgttgcttagcttgatcttctcccacatgttcgccggagtatgcgctcgctcgattgttttcacgtagagatagagcacacctgatgccaaaaagacgacgtcagcgaaaagttgccaggtggacgtaatggagaaatcaaaatggataaatcgttcaccttcgtgttctctcaccgtcgcatatcgcgagttggccaaaggacaggattgcctcgtgcagaatcccgtgagattgtactcattccgacaaaagttttgtgtggtagtcttgactttgtaagagcagaacctacaggtggaaagagttcccaatcagtgtggcgacgagacattgacagcagctaaatcggctaactgttggttgatgaccgaccagatgatctcgtcgttctgcatgatggcaagttgaccctgtagctgtctcgtacggcgatgctggcactgtttgtgggttgtgattgataccacctacagagagcggtatatttggtagcaaagcgatggcccgtcggtagagactgggagcggagacgctgatgtttggcgaacgaccatttgacagatcactaggtcacgcaggtcaagaccgaacttcttgaaataatttggttcctcaaaggttctatgtacgtaagcgccagtggcggaagggaaaatagcttgacacgtcataaacgtgacattgtggctgatagggttaaatttgataagagaaatgacgcttagggttcaagttgaaccgacatgacaacatgccgtccacaagctcacaagagatttcctcctacttgttaaaatccagccagacgaatcatctcaacacgttcgacatcgctctgattcatatatacagcacagatacaactttttgtggggactcttgcttcctgaacgaccccatcgtttgcgggtcagatatgttcggcaccgcgtcttactacaactcgaatcccgcgccgacgtttcctcgatcgcaatcgcaactggcatcatcatcggtgtcggtttacaaccagcagcccgctacttcgagcaacagccttattcaaggcgtcgtgccaggttcgagctatgctggacagatgcagatgagcgctgctggcagagagatgcagctgcaacagcaggctcaaagtcaaatgcaaagcatcagcggcatggtcaaggctgacccctcgaacaacgtcaatgcggcctatcctcagccgcaacaagtgcagcaatatcgccagtcggacgtcagcaaccaagtcgcctctagtacccagcaggcatcgagttctcaaggctcgggacaacagtctagctcttccgatggtgaccctgccatcttcattcctctcaagactgcaagagatgctgtggagaacatgatgaccaacgacgagtccttgtttgggaacgggttggacgatcaccttggagcaggtagtatgggtagtgggggactggcgaggcgtaagttcgagcttttcatttccctgccagccgcaaactgagcacacctgctgctctggcaaatctttagcatcactgtcaaacctgtacaccagctctccaggctcatcagtcgaatcgaacaatccctgctcacctgttgttcaggtcagtaagacggaccttccgaacggagtgtttggcatgctccgaggtaggtcgacggattttattgaaattcgatgtcgaggtctaatctcgctgtttgtgtctcgccggcaaaggcaaaggcaatcagatcgctcagggacttttgacggatgttggcagagcctggttcgcagtgaatggaatactcattctttgggattacaccaaagagtgagtcctgattgacaggggtaatcaccgcttcgactcgctgaccccctataccgtctttcagaggggattcaggtcttgtcaaagtcgaccacgacgctggcaactcggtaacatgcgtgggcttggttaaagcagatccgagtcagtcaaaatacacatgccatctatatctcgtcgcatcggctgatatgcttgctatcgaacattggttgtcagatgtcttccaagggttgacgcatctgctcgtcgtcgccggaaacgcccggaccgctcttctcggcctgtcctacgactcgtccagtcggtctatctcactcgttgacatgatgcccaatcagccgttcctgtccgccccaacacccccctctgcgaatttcactcaaatcgtatgcactcccgtcggatcaagggtattcttgctcggtatgggctgtctctatgaatttgtgtacgaagccaaaacagacgggagtcgaggatggttgggcatggtagtgggttacggcggaggcgtaaaggaaccgaccttcaagaattggacgacaagtcttgaaggttggggtaactttatcccattgatggtcagcaagcgcgaaactcttgttcagctggcaattgatcacgagagggacatcatctacggattgaccagcgacaacaagcttcagcgatggtcaatcatcaggaagaccgcatcgaccggtggaaacgcacttgaacccaaagctgagggtttcgtctcaccggtggacttggcgagaaggcaaacggaaggaagcaaattcttcgatcagggcacgaagatcgtcaggattgacgtcattacgaaaatggaatccgaggcatgcctagtgctaaccacatcaagcagtgagtctgactgtgtagcgttcacgtaaatcatccggtactgacatcgtaaacgcataagacgctcgaatatacatgaaggacggcgctcagtctcgaggaatgggatactcttacgctgccggtggcttccacgttgcgcatattcgacttcctatcgaaagcgtgcccgttgcccaggggtccggtccattgagcatcacctcccgaccactggcgacgagccgatacatgcatggtgtatacgctgcggtgcatcaacgcgcagaagaaccctctcagatgatctggtatgccgccgacccattcgagtgggttgacttggctgcaaaacgtcagcagggccaaatgatcacacaggatatccccggccgcggtacgggatttcctgaatctttcgctgggatcgactttacctcgaacgtcgtggatatcgcggaggagccggaattctggctgggcggagaccgtgcgctaagaagagtggtgaagggatcgagtgggcctgaactgagcgtgagggagacgcacgaaatggtgacggaagtcacaatcccctcgcgcaggagattcatcgtcatgaccaccggtggcgtgatcgtcttcgagaagatacggccaaaggacaccttggaacacttattcgcgaacggtctcggaagaaccgagttcatgttggggattcaaagacagtcagtcgacaggctctccgccgtgtttaattaaggtagccctcatactgaatatcatcaactcatcacaacagactcagctcttccgtctcaccgttgctggcaattgatatcgctatcgccgctgagaatggtaccggtggtcaaaatggaatgcgagtgcgggactacgtgccgaacaatgctgctcaaggagctttggaccatctcgtcaattgggcgaacgagcagcagaagcagaaaactttgtgtcagtatcttgtgagctagagaggatgcacgtctgaaaatatctgacgcgtttcatgctcgctttcgctggacctctaagaccaccaatctgcaaacgccgcccaatggaaactcgatgctgtatatcttcatctctcaagatcgctaaggagcttctggaacagcaatgtgcttgcaacgaagtcagttcatgtttgttggaaataccttttccacattgcttatcaagaactcgccctgatcagtccatcaactcagctggcatcgagctcgctatcgattgggcaattgcagactctgcgagaccggctcgaaaacatgcgtgctttgttggatcagttagtgtcgcgcgttcaaacctgaaaagattcgattcagctaacgcctacactgctagccgcaagaatatcttcagctctatcgacccaacctttgtacccaactcgaaggcggcggattcctctgcggacagttttcatccggccagagtcttactcgatcagacaatccaggcacttgcgttcatgattttgctcagcgaattccgcttcgaatcagtcctggccaggtaggtagtaaatctcaataccgatgctgcgatcgatcgtcactgacgttcgccgactacgcagatgcgattcctcgcttcaacgagaccttggcatgatgagctacttccagctgatagtcgatcctcgcggccgagatttggctaagcgattagttacgaatgtggtgaatcagcagattagccaagatatgagcgtaagtcctcttcccagagccaaagtcgttgccttgactgagcgctacttctaattcgtttagatcgagcacatcagcgataagcttcaagagcgatgtcctgcgttctgcagtcgggctgatgtggatctatacaaagctatggagagcttgaggaaagcgaaagaggtgcggcagggaattgagcgtcaagcacacttggaatccgcgctagagtaagtcgggtcaagtttgctaaaactcggcaacaatcaccgagagtattgattcctattcgtctttacagcaacttcatgaaagccagtccagggctcagtgaagacaagctcaacgaaatcatttccgatttctgttcgctggactatccagctggtaagtggtcattagccggccattgagttaccatgaccctgacaagaaagcctcccaggctgcatacaacttcctatcgagaaggctgagcgtgtcgacccggaacatcttgcctttaccttttacctggacgggcgccgcgaggacgacggaaggaaaggtaactatgagcagcgtcttaagtattatttattggctctctcagccgttgagaagtttgacaacgacgcggcgcagcaaggtccaggtatgcaagctctgtcagcaaccgcgatatgtgataatgttgacacggctggtcttgatgatagcttcagaagcgagtcgctctcgagatttagcatacgactatgctctcaatactggagatgacttgttcttgatgactctttaccaatggatggtgcaaaaagggaaatcggatcaactgctcgaggtaagtaaccctcctgaattgttcttgtccgacaaccgaagccggcgactgatcgggacgtcgatcaaccagttggaaaatgatgccaaggttgaagcttacctgcgctaccgaggtctaacaagcggcgaaccaggtttgctttggagattctatgctcgtcggaatcgacattatcgggcagcgcaagctctgagggaactcgccgaggctcggtaggttcaagtaatcacaacttctgccaccgggatgctgataacagaatttgttttgcgtttagtatcgatcttccgatgtctcagcgggtcgaatgcctcgctcttgcttcgatgcatgccaaatcgtcgacaatgcaagattcagagcgggctccagtggactttgtcacggaactggaagagacaaatgacgttgcgaacatccagctcgagatctgggaggtcatcgccaatgatcccgatgtaacagaggaagctgcaaccaaggcagagcagctgcaaggccgcttagtccagatcagcgaggtcagtgagcgagtcgatgaatggggagatacgatctcattccagcattgccttgcagctttttaccgatttcgccgagcctctcaggctctatgaatcccaattgaccatcctgcatgcatccgatcatcgtgatgcacaactggtcgcggacgtctggaacgctttgttacttaagggtatgttgctcctcttgttgttgacggaccatggctggcactaacacatatcatctcgtgcagccgatcacgaagcggaggatctcagccctagccagcggtacaggcccttccagaatctcgtcgtacgattgggcaagcgtttctacccttcgcacgccgcctttccaacgggtgagtccaaatgcggcataactcagcgcctgtaagctcacatccggtcgttaccgatcgtgattaggtataatcgtgcagtcttactatgagcgtggctttgagatgaaggagtctccgtcgggttgggttacgggtgcgctcatggaagcaggaatctcgtaccgagagatctgggatacattgggctacctcgctcaagatcaggtaagcatctttcgcatggattcagctggaaataccctgactaagaccatatgaaactcctgggtctatcctctcacagcctcctttcgacgatcaggaaggtaaacgatacctggaccacgagatcgctgtgctgctaccaagctggattgacgctgtcaatgcagggcaggatcaaccgttcttcccaggagtaagttggatgacagctaaggtcctttaccgagagggtactgatctgaacgagatcacaggtcacggactacctctcgatgcgttcaaaaagcagggacacggaccaagacgtccgcgcagcgttcgagagggggattaggcagatcatggatctgctgagaacgacacgaacccattgatgctgcagtccagcctattcatgcagcgaagccagaacttgttcttgttctatatggtccatgcttttcgtcaattacatcagtctctgttgtccagtcaatggtgctcgtaatgctcgtcaacgtgttcgtgataaatcgtgggtgggttgattcgtagtgaatgtttcattatggaaatgcgtcgaagttgcctgcaatggcccgcgcgaaggatcagcttcccgaacgacgatccgtcgcgcacatatccgtctttgtcgtttcgttcgacgtcgacttacggtgaactcgatccaagtgcttcttgtgaacccagtataaccatctgaagttgtcgtcaccaaacactagttctctatcaactatagccgctcccaacatagcccactacctctccggtggcctctgattgatagctccccagtgtcgatgaatggccgtggcaagaacgttacgcggagtgtccatctggaagcgatagtaagcatcaactacgcaaactgtcttgactttgcactttgctatgtgagcaaggcaatcgtgcagtatagtcctgatagtatgtggtagttgatgtcgctgcagcatcaagttcgtcgacctgaaatggaactgtccggggactagtccatgcgtcaagtcaaaatactcgacaacctggtggatctggttgcagttggaggatgtcaccatcattccccactcgtcctgtcgagcctgaagggaagcaagaggaacctgctgtgtcgatatgcccgaggtgaacaagaaatgccggacatgtgatatccgtaagtcttgccagtagtgttccgtggaacccccctgcactgcttcagaccatgcaaaagcgcttttctccaacaggttcccgtactccttccctgtgtgagcctcactggtgaacgcagctcttgcaagacttcgagctagaggcaactggaagaaggtgaagttactggtggctggccacacagtagactccaacctctgcagtgtgcagactagcattcgactcagataagtacttgactgttgccaaatactgagcctcctctactagtgcatcccctgcagtctcaacagccttcagggtcccaggagaacttaggatttggcggagtcggtccataagcggctgtcgaacctgcgaaacagatatcagctttccgtaacacgaaatacgcgtctcgagagggtctctccggtgggccgggaagcgaatcaagggagcacgagactacgatcttgaccgacggggttgggatggagcgcactcgggtttcaagacgcaagagggcgaagccacgatcgtgatagacgggacggcatccatggaccgaatacggatgtcgggacgacggggcaccaagccaagaccttgacggacgggatgatggcggtgcggacgcggttgacgagacgcaagagcgcggagctacttcttttgcgaaacgcatcatgatttgggaacgaaggcgagtgtcgggacgaaggcgagtgtcgggacgaaggtgcacgaggctacgatagtggaggatggaacggcgaaggtggcgaaggtggcgaaggatgctcgacgcccatgattctagtacgacacccattgtttacggctgatggagcgcggatgtcgtatcgaatgatcaccgtggagctgttttggctaccatcgcagtcgttggatcttcgcagttgctgggtcgtttgtagtatcaagtcgtcgtatcaagtcgacactcacagtctcgtattgggcaatcccacccaacagttggttgcacatcaactcaactgtttgctcctccagcaacatctcctccactgttgctatttgacctgcttcagtacctctgtccaggactggaacatggtactgagtgtagagtgttgaatgggtataaggagtacccatatttgaagctgattgaacagagaggcaagtaagtagatgtagttggaaatgtcatttcgttcttttgatgcttgtcgtcagggccaaatgatgaagctgaatgctgatcgcttagcgtagcttgctgatggctcgtgtcggcaaaagccaccgacaatcacttgccaacccagagtcatacaactggtgtctttcggattctctgggacagacagacgtttcacgacaatcagaaggtcaccgtgtcgtgcagcaagttcgtggaccatcggcattgcgtcatcgaccggcgtctactacaaggctcagtcggacgcatagagtcacatatggatatacgttacaatcagatcatgcatcctgcgtcatcgcgagcgatttgctgaagccgtcggtacatttcgattcggcggatttcgtcgcatcccgacttatagaccaacaccgtctttccgaggacataactcttctctgtcctggcatttccgtcgtctgtagctggcgtacccggtagacgatcgatcccggagttttgcgtcgaggaggcgattctcaaacgtcagagtgcaaagcatttgcatggaactttgtctagcggtagccctttcctcgcgtgattggcaaactgtgcggtgtgtcgccccgccgcaatgacttgatgaatcgtccaaccttgatgactccagttcgttgtgccgtccagcgcatacgaaggtggttcttccgctagtacggtcgagatgcctttccgctctgagccttcgccacgtcggatcgtgcctcccgcgacacgcctgtttcatgcggaatgccaatgacaccgttggcccaaacggtaggttagattcgcgtcgccccggccggattgaaacgcgacaagtcctcgaccggttcctatttttgtccctgtgtaatgttcgctaccggtcaaggcggtcctatgctatgcccctgtgactctgatccacaaccctccctgttctcggcccaacaggagcaaagtcagctggacgatcacgcgtgaggagttgcgatccgcgcgacgcgactcaccttgacctgaagggtcagattgctcgatacccacaccctttcgtctcgaccccgaccggccaacgcagaccaagcctcaggtggcggagttgcgggtgccaagacgatcccctgtgtcgccccttcggaggcttccaaaattttgacaagaacgtatttgatctgcatgagagcaaagttttggccgaggcacttcgagagaaaacgaaattccgtcaatcagatgcatgatggataagtcgtccggaccactcgagctcactgttctgggtccagtagagaaagggacagagcctcgagttgaaactcgttccccggcttcgttggcagatgaatcccatctctcgggtctgaattcctcggcatcctcgccccagatggccttcgatctttgcatgagaagggtcgctaggatgatcgacgtatgggcaggcatatagacatcgggggagcctttgagtacgacctcggtggaggagcgtcgaatgctatcgaagaagcatcgtctggatcagtctcgggtgatcgagctttcccatcaagtggaactttcgcctagcactcacttcatgggtactggaggatacaagcgcaagacttcctggacgaagaagtccacttgaatacgaatgggcgacaagccgtaagaggtcagcgcgaatctcgaatcgacatgttgtagcgctgtactcactatacctcagatccttcagagccgagtaattccaatcctggcgtcgagtcgactgccgaatctcgctccgtagcttctccatgatgtccgggtagagggtaaggcaatatacacaaaagctcaaagccgaagcggtctgggcgatgtcgttggttttgcaaacacgtcgtacggggtcaggtatacttcaacagagcgagcgcggcaagggcgaaatccgcttacagtgtctcttgcggcgacgagaatgttgatcaattcgtcctcgatcgctgctcgatctacacaggtcgatttcagctgcttcaaagtacagtgcatatctgctgcaattgtacttaccgcccaagctatcgatcaggtggtccagaagggtgcctttgcgctgcgtctcagctagaccccttgcatctacgcgtcgttgatatgctcgatcgaccaagggtcgtataaatcccttgacagtctccatcggtcttgtcatcttgttcccgccaagctcgaacaatgcctgcgagggtttctcgttcgtcagagcaggcctcggctatcgacctcggtgtgtgtactcacccagggcgtacccatcttgatccgccttgacagtactgcctggcatggtatttcggatgttgcgaccgtcattggatatggtttaccacatcgtgtcgagatcagtggcttacctgtgcttcagcgaatgccatggtgagttcctctccggtgacatgttctccatgtgagcccatgagatcccgagtaacctcgttctgaccggtctcgtctgcgagtcgattcccacatgttttaccggcgagtctgtcgagtccacctacacaatgaccgaagaggaactcgcttgcgacatccagcgtgtaggtcaggaagagtgcctgtacatcgacggagcctccctgaccgttcaaggggctatcagccggttctctaggagagcgaaagaccttgccggtcgtgccttgtgtgcccattatcagatcgatgagcttggcggtgtggggttcaagagtggcgatcggatcgaacgccgccgagttggtcctcgagaagaacggtcgggtgaacgatcgatgctacggcatggagattgtagcaagaagaatcagagcgatcaacgtatagccaccgtgattgtcgcgtctacccacaaacttccagttcgcgccgtcccctacgaaaacgcctcgagggccgaacaacccttttgcacgttccatgaatttggctcctttggggaaactctcaaacgaacccgagagtatctggtgtatatggtccggattgctcgtaatcatctattctcatacggtttcgggacaccacgatctttagctccgttatcacctcggacgttcccggttgcgcgtttactcacactatcttcacccaagatcttggtattgaccgtccctccagctccttccagagcttgcctgaccattccttcgcccagatacccctcctttccctctctttcccaggcgagcatcagattcacgttcccgatccgtgcgaggcggtccagccaggtcgacgatctaggcttcgaagccggttcgacgaagggtatcatgaaagcggatagacttcgggctcgatatcgaaagtaggccgtccgtaggtagacatgtgcgctataaactgcgagaggggttataaagtagatccagactctcaagaatataggccaggtgctgggtagggagaggtaaaagaggatgtaggggatgactaaatttctgatcgtcgctcgctgaaagattggcgagtatggcgggaggtctcgcatccttgccggagagatgcgaggctgtagtaaaagccgggcacggccggtccacaagatatcgtcccaagtttacttggccagagtatagatcagacaggcctgctcgatggttcacaccttgaagtcgattgcatcaaggtcggaacgacctgagcgactcggggaagtttgtgcatattccagtcccattgccggaagtaaattcccacaccgagatctgcatccggtagcttcggaaggaacgcaagtcacctcggtcgagggttcttgctggagatgcagcatgtcaaaagaaaaaacaagccacgtcatacccaaactcgagattatcaagaaaatgatcgagacctcgatctgacgtcatttgcaacttggcgctttgccagtcgacggtcgatcccgatcgtttgctcgccagctgctggctgttggaggattcccgcgaccgagtacttacatgatgcaaaccatccgattcgacacaccgaccactttccacacaagtactcgtttattcacaaatttcaaatctatcaatctacataccgtctatttccctcatcaacgcacattttctcactcactcatcctaacaatggctctcaaacgaaacgctcctcttctcttggccgctaccgtcggtaagttgctgacgttgccggtccggactggtctatgttggccaatctcgagtctcattacccttcggattgcttctttcaacgatacccaggtgttgccggaggtctgtacgccttcaaccagcccttgaagcaatacaccgaggaccagaagacgcacgactcggtccgacgatcaagctcgaaccaacctcaaccgggcgccgcatcgggtggtgcctcgcccgctcctcccctgcacaccggaggatccagcccttcgtccgccaacgctcctaccatcgccggagcgtctcccgatgccaggcgaggtaactcggtggatcacgacgcgcccatgaggtccaaggaggatgccaagcagcaggacggaactcagggaggtggtatgggagtcaaggagatgcgagagaggaagatggccggtcagggattgcctagccctcaggtgagtgcccaaagcttttcgtcgaggacgggccggactcgtccgtcagggttcgtccgcaaccaccggcacccacgatctgacggggacgatccgttcgtgcataatatgcccttcgccgacgctgactgtcgagcccttttcttaaactagggtggagacaccaaggcccaagccaagcccgctcaaaaggcctactcggagcaccagtaaactcacgcctttactttcacacctaccgctgtctgaacgcatcgagaatgacgacatccatcatcataagaagaagaagaaccgggaaatcatgtcaaagatcaaaacaccgagcttggcgggactttttgtacctgtcacgaggcctgtgcgcttgagagagcccttaaatgtaataatgaaacgaattgcgggtccttctagtgatcggcgagtctgtcttgggcggggattggtactactagtgcaaccgttgtgctcaaatcaaaactttgaatgacagtttcaaagggctcgtgactggtacacctcggagctgccatcatttgacgttggtcggcggggcggtgagcacttgcgagggcctgtggaataacgtaaagcgagttggttggcatgccgacgtactcccgaatgagacccaatggctgttctttcgggatttgcccgagacggtcgagtcgacatttgtttgcgctgccttgaatcctcgaaagtagccgtgctgacactgtggccgtggttcgagagctgcttgaaaagaccggtacacggtgatacagactcgagttcgtcgtgattgcgaaccagctgcagtgtttttgcctttcggttccacgagctttgcgggccaacgctataggctcatctctcttataggccgattccatcacggccttgttggtcggaactttcgtgactgaatcgtcctccatgtgtaaggctatccacgcaccagcacggacaaccgtagtgacattccaaaacttcagggcccgaaccctagcggagatgataagcacaccgacccttaatctcacatcagaacagggcctggtagcgaggtagtctgctccccctccctacacagggcagttatcattgcagagatgaacggcctgtcctgcgattccaacttggtaacggaccggcaccgcggcactacacacactcgagatttccatacgagatcgctcgaacagctgcggaattgtttgacaataaaaccaattgtgaatggtgtccgacgcacatcatcttctccctttgtatagaaacggcacaacgtggacgttgtcgaagggaacgaaacgctgtcgatcgtgacacgccctggatgcatcgcgattcaggcatcgtcattgcagagacacgaggtacagcaaagatattcagctgtcatgcggataatcacgtcttgaggaggagtatggatagtccgcatcatgattgcgtgtggatttcgaaccgttccttctctggcagtcacgaaataagttgttgcatctacccttccagaccgatatttgagctgcaagcttctcgatgttgcatgtccagatggcgaccaagatcaacctgacttcatgtactcttaagtccatcaacgcggggcgcagtgcttgggactcagccccatcctcgagaagcaattgccgatcagctggaggctccgcacccacagtaagatccaaatggaggcaggtagccgtctgggtccagcctcccgtcggcggatcacatcttccgataccaaattccctacaaaaacggagcatacgtgtttctcatgcccatgataatacggcggatcgcggagctctggttttagctgtcatatttgacctgtccccccagaccgtcaggctctctgaaacttgaaacccgtcactaactttgaacagactgatcccgctgcctggccctccagatctgcctttcggtgatcggaagtatttctcgaccgagggtcccgagagtgatcaagtgaattatgaccgaacacatgggatggatctgacggctacacggctgagctgcacagctagcgatgtgaccgcgcacaatcatccgcatttcaagtgggctcgagtcttgccatcgacaaatagagtcgtgcaatgaaacacggtagagcgtacggcactgcccgggcaaacgacgtagactttcgacaagttcgggtagacgcgagtcggtcacgtcacgaggtcattcactgggtgtgcacgagagaaagttctcgacttgagcggctacggtgtcgcatcgagtcgtcatcgtcgtcatcatcatatctttaggacgagtaccctcctttggaaagagtggatagaggccactggaaacccttgtcagcaccggcttcaaccgtcctctgttcttcacccttagatctcggcatcatagcagctgcatcatcattcagttgaccggtgatcaatccccaagagtccggggatcccgttgattcggatcaaacgacggatttcaaccgtcttaccacccccgtcccccaaaaaacagccttgctgtacctaaactacgaacagtcaagctctctccgcacatgcacagcatcaatagattcgacagcagtaaaagccaataggcacttcatgaacattcatagactcgacttacgaacacaaaacgacacgaattcaatcactcgaccgtcaaagcttagagaatccttctctccgaaagagtcatcgagggaaaccgacgatcctgtacgacgatcctgtccctttgacaaggtgggttcatatttggcctagcaaccccccttgacccgtaccccgaaaaacgttctgaccttggtatgtccattcctgagctagcctgcccagacgattctcgacgtcgacatcaagatcagaccaatcgtggaagctggatcgcactcaagttcttacaaacaggaccacttgagttattcgcagtcaatacctatctggtcaatccccaagctatcgacaagtgttctcataagagccgatccgaatgcaatactggcggcaggacatggacatcaaagtgacatagttcacgaagtggatacgtccaacaacctcacgacattacacacgcacatccacgtcaagctttagcggggccaatcagcgcagcattgagtcgaggaggtcaaagtaagctgctgccttccatcataaagacattcaatttcactgactgtggtagagtgatatttcatgtccagccgtctgcctctttcacttcaacatgctgaacccaagaaatgaccctcgtcctcaggacatagcatcacgctctacaacgactcacgactcgcaatcaagacctatctccccggacggcgctggccaacattactcgtcttcgcctacaagaatccccgtgcattcttcccggcttcaaatgctttccaatactacgcagccgactggtggaaaggacaggagccgcacacgcaagactgtgggtccggtgcatggttcgctgaccacgtccatgttacgcccggcgaggccggcatccccgtattccaatcctgcgcaacgatatcagccgggtccaagaattcggctaagagtcgtagaagacgggagatccctctcatttgtctcggatcgaggaagacaacagatcgatttggctagtcctccagattttcctgcgagtttcggacaagcccagaaccgaccgtatcgaagcgacagaaatcaattgatttcttcgagacccatggatagcgagggcgataccgcaaccagggctagtaccattgagcgggccgaaccaaaaagacgaattccatcgagatctgcagcctcgcctcgaccggacccgcctcgagcgttcacaagccctgtcctgccctcgagcaaagagctctccaatgcctaccccggaacatctgaagagtctgcttcttcgagcctgcagacccccaaaaggggcaggaccaggacggtagcatccgtcatcggtcggggctggcagatacaggattctcttccagtagcgagtcccctacgagcattgtctcccgggatccaaccgggtgccttaaacctagccgttcttgacacagaaaatctcggcgtggggttgggaggccataagctcggtgtgaggcaaccggaacgacaggtcctgaccccctgtgcctcgccacccaaacgatccattcatgccatggttcttcccatcccgatcggttccggagccgcggtaaagcgcaatcaggacgtgcccaggcgcaggagcgcgagtccacgggattcggcagccggtacatcagtgcaggcatcaggctcgatcttgagtggtgccaggagtctagacgctgtcgaagacgtctttgattccaagccgatcttggtctcccctgctacatatggtccatcgcgaagccaaaaccgagatgatgaccacgaccatgatattgacgtcgaagctatcgaagctgcgctctctgatgcgatggagacgagcctcgagttgccagatattcaagacgacaatggcccagatgcgaatcagtatgacaccatcaggtcgtctggcaagaggaagaatcaggaagagccggcaatgtatcccgagaaaaagggaaaagtcgccgaccttgtcgctcgctacgaagagcctgcggccatcaaagcgaggccatccatcttcaatcgagccaagaccgctgacgagcgttatcgcagaccgatgagcatgatcattcaggactcggcttgtacgatcgctctctcagccgacggacaagcctcggcagaactgactcctagccgtacgcctaaatggtctcgagctcagacgatgagggccgaagtgtgcttgcataagcggccctcgatcgacaatctcatcaagggactccagccgatcgacaacgcatcattggcggccacggaggcttggaaacctctgggaaggttgccccgaagaggtaccatgccttcagtgatccaggcgctcgaccgaaaggatcctgccgatcagaaggctcgtcctagcctggtcaagcaagtgacagaagtgatactcaccccgattggaaacaccgcagcgctagatggagatgagcctggcgcgactgcgacgcgtatgaccgagacggaagctttgaggacggcctcgatctcgctcaagcggattcaggacgaagacttggaaaggtccatgcatgcctatcagacacgtagccgctctcactcgcccgcatcgcatttggaggcagcgtaccgagcttccgaggcggctgccacgaccgcatcgaacggcttgtcctgggatacgcttcaccgtcagaatgtcatggagcgggcgagacatgtggggaacgagtggtttcgaggtagaaatagggcagggactctgggttcagtctggcccaacgcctccaaggatttaccgcctggaacgactccacctattaccagaccaggtctcctcaaccggtccgtctcgtacactgggaagagcacgcaacggtccggacgcgattcgtccccgactgcgtcgacggataggaggccgagtggcggagagacgacgttgatgcatacgcggtgggacggtaccaagactcccatcacggagagggaccatccgacgcactacgcggccttgcaagagcatcgactcgtcaggcaaaagagcaagcaaaacttgcctctgaaacgaacgcccgattctacgtctgatcatcgatcgtccgggaaagatcaagacgtgccggccgtcggtctcgcttcgatcctaccacccgtatctatcgagcgatggaggcagcagttacatcaagcgggcggtcgcactttgcctcaggtcaagtcgacggggcaacgttcgccacgggaaggatctcgaccggtctatcggcatgcgcgtaccctcccgcttccgctggacacgtccaacctctctcgatcgccgacgttgtcccgctcgaataccagccaggatagccatatacccctctcggcgtgttcgggcgccagtttcgacgtcaagacggcgtacgacagggtcaagacggagaggggcctggtcagctttgatcagattcccgggttgaatgacgccgattgatcgggtaactatgcgatcgaggcgtgggagtttggatcggtgtgcgggattgcatgtgacgatgtcatatttatatatcattatatcgaagagtgttggcctggtgtatattcgttcgaaggctcgacgctaccggctcaaatctctagaatcctgtgcccctcaccggctatctcgcctccaaccatcgtatcgtgcgagtatgcgtccgcggttcggaagtagatatcatgtgagtctggggtaccccacacactggcatccacgcgaatgatagcctcggtctgggaattacgggagcaagttacaaaaaggcaacaaccgggtgggcggcaggcagaggaagggcatgggcagcgacggaggggtggtgttcgtcgtcgtcgtcgtcgttggtttgcgttgcgttgcatattccttcctttggatcctttggccatcaagacgcaaaacagagcaggctatggcgtcgatcgaatttgatcaggtaatcttgatccgaatcgatccgcacattgatgtaggatgatcagcttgtacttctacttcgacatcgaccaccatcctcaataaataaccatcttgactcgccctgtacgttttgaatctctctcgatcggggttctccggaatctaaagtcgaccacctcggtcaacaggtagtaaagggtcgagccgtgatcggtatgtttggctagctcgttgttatgcacaactctcattgatcaatccgctactcgcaaatcagactctcactttcactcccggtgctctcacaccgaagcctagaaagcttgcaaggtcgacaaccaaggctaaactcggcaacatgcgatccttcccatcaaccatcatcctccccattctttccctctcgtccctcttcgtatcctctcaaaagacatgctccaattacggttcaccatcatcgaccgacccggacgtatgcgtctgtccaccggggtttctcaactcgacggattgtttgcaacctcagtgcggaggaaacttgttgaacccggggacggggatcgcaccgatcgcttcggcggcgggcggattggggaacgtgaccgccggcgggtgtgcgtgtgatgatggatggactggaccagtctgcagcggtgagtacgaggtgtctctttctaaatgatgggggggggggggatctttatcgctgaccgatcgacctgctcgacctgtatttttttgcgcgatagtatgcacctcggctcaagcatgtacctctctctttccctcatcggacgacagcacgacgtccacctcgcccctcatctctatcccccagaattcgaacctttcctgctcttcctcggcatacacctacgcctcttcgcaactcttgtgcaatgtcctgaatcccacacttcaatccttgttcagcgggaagagccagttgggcatcaccaggacattggattggactgacggacccgttggcagggggaatcgaacgagcgggtccgggttggggagcggagtggcgtacgcgcagacgtggtacgacggcgtcgagcaagcaagtatctcttccttcaggtcgactgatttgcaagtatcgccgatgagctgatcacattgccgtaaattcctagttcaactgccgagctacgagctgttcacagtcggattactcggccacgtccaactcgtccacctatacttgcgaagaactcacctgtacttgtctcccggggacgacgttctgttcacagctcggcaacgtcatcgatggtctagccggcccgctcgacatcacttgcagctcggcgacaacgtcggacgcgctggggagttgcacgttctcgcagaccttgttgaaacagctcttccccccggacgggctcaacttggtcgactgccgtttcggagaatgcgtatcccagacggtcgtcgatcggatacagggcaacgtcgtcgcctcgaccggcgggtcgagcggaggtgatggggatggactgtctggcggggtcattgcaggactagcagtggcgggagccatcgtcctagccatcctcgccctcctaatttggggcctcatcgcgcggaacaaggccaggaaaacctcgccagccgggatgggcctggatgaatccggtttcggtaggaaaaaaggatcaggcgccgggatcgagtggaccggagtcgggtaccgactaaggcggtcggcgggcaaatcgggccttttcaagatcggctcggctcgatcggaaagggatgaaggcaaggtcatactcgagggagtcagcggccggatgcgacccggtgggctttgctgcgtgctaggaccttctggagccggaaaatcgacttgtaagatgtttgtcgtgggcggacgagatcgcgggacatcactaaccagcgaacatggtcattctgatcagtcgtggatattttggcgggcaggagaaagacgggtggcaaagtggttggcaaggtagatttctttggtcaggatataggtgtgacgggggcaaaaggagcggccacgcatagagtcgggttcgttgaccaggtgggtgcatcaggttcatcccgaattgcccaaattcagagtggactaaagtatgaacattcgttcctcattccaggaagacgtcctcaatccgacttctaccgtacgagaaaccctcctctttgcggctcggctcagattgccggaatcagtctcagatagtgccaagcaagagcgcgttttcaaggtgatcaacgatctgggcttgatcgatgtggcagacgtcaggattggtgatgggatcaaacgaggtgtcagtggcggagagaggaggcgagtcagtatcggtgtcgagctagtagctgcgcctgatgtcctcatcttggacgaacccacgagtgtgagtcccccgttgtcccagaaatatcgttctaggcggcgtttatctgatgctgccgacgtcgcgatgaacagggcttggactcggtctctgctgccaaagtggttgcgatcttgagagacctcgcacacgatcccgactaccctaccacgatcgttgcctctattcatcagccatcatcgcgcctttatcaatcgttcgacactgtccttgtgctcgcacaggggaggcaagtctactttggacccggcggacatgcacccgcagactatttcgagcagagggggatggcctgtccgcccgactataacgtggcggaccacttgctggagattgcgagcagtcctgcagcgaccattcaatcgttgagcgacggatcgtcgtcggtttctacacgagctcaagaggaattgacgctcaagggtacggctcttcgctcacaggagacgccgggcatcctcgaaaaaggacacatggcgttgggcggggcggtcccgactctgaacggcacgtcggtatctcaaggaagtgggtccgactcggaagcttgggaagatcgcgaagggaacgtcatcttgcccgtcgcctcgaagattagccaccgcgcggcagctacattcttcactcagcttgaggtgctttctgggagggagatcaggaatttgaaacggcaagtcttgtcgtgttcaatctctgctcatcgtgagatgaagctgacgaggtgacgtttggatttggtagagactggtcgctgctcatcacccacgtcgtcactgcttgtatattgggcgtctttgctgggggtctctacttcaaggtcgacctgtccatcgctgggttccagaaccgcgtgggaagcctgttctttttgggcagcttgatcgctttctcgactttgaggtatgtttgacggtcgctacaaaagtttgcaaaggccactttcatcgatctggatcctgatatcaaaatctgcagtgccctgtacaatttcatgaacgtccgcgcgctgttcctgcgtgaacgagctgggtcatactactcgtgagtccgagatcggaaacctcgtcattggcgctcgcctcgtcttacatcctcacgtcccggacagacccttggcatggttgctttcacgcatcatgttcgacttgatccccttgcgcttgatccctaccatcatcgtatccacgatcgtctactttatggtgggactcaattcggacgcagcgcggttcttcaagtgtctgttgatctttgtcgaatattctctggctctaacgttgtttgtgagtaccgccatcgcgatttcgtagacgactgctcgtcgctgatcgtctcgacacggcgcgcgtccggtagaacatgctcctcgcggccgtcttgccgaacggaggcatcacgatcctcttgtcatcgttgcacaacctctacctcatgacgtatgcggggttcttcgtcaacctcagcaagatcccacccgtactcaggtggcttcgatggttcgatgtcctgggctacgctctggaagcgaccgtggtcaacgaggtcggcgccgggttggaaatcgtggatacgctcgctgccggtaagtgaccacaccaccgggtcatcgagaccgagatcgagaccgggacttactgaatcgctgatgtcgtcctgtgtatgcgtgatcagtccccgtcaggatatcggcgacgctcatcatggataccctgtttggattcgggctgggtcacttttatcgcaacgttctcgtccttttcgcctttatagccgggtatggggcgcttcttgtggttgcagtgtggttcttgatgagggagactcggtagattcggtggtgcgtgtatatgattggtgctccatattgtaggtcgttctgtgggctgtatataatcatagtcatttacaacccggtgtcggtgtcctgtaacatggcgccaacatcgcacgcggtagtccggtgctgactgacttgactgtagccaatcatgttcttccaaccttgtgttcgctgtttctcgtctcttttcgtccgcgtcgttggatgattcgtcagagaattcgtcatccgacgtccccaattcaaaccaaacaaccaacaactcatccaacttatgtagtagaagtgatgctacacgatcgacacaggtccatcttgttagtcgagtagagtcgatcatcggcttcacaagctccaggttcaggcttcgagctcgaacagcaaccagacttgccgcgacattgacgttgacaccgccactccccgaccatcaagttcgaaatcgggttccctcccccgtaaagacgtcgggacgcgttctctttgtcgtcctctcttttacttttccccggtcgggatcgacaagccgtctcataccgacagagcacctcgtcttcccctgtgaatacggcacgtagaaccgttcgtcgctatactggatctcggacctcttcctcgtaccgccgtcctacacctagacatcaggtcgatccatggaaaatcggtagatcgattccctacacgtcacactcgctcatccaatccaccgcctgctccgacccgtgactgccttgtggagatacctaggcatccaaacgtgagacggtacatgtccccggaggaaattctcttacaccgtcccatctcggaacacgcccaaacacccccctcctcagcccggatcagccttacatccgtccctcgaaaaatcaacgccttgcctgccaaacatcgcttgatatcaataccgacatcagcatcagtatcacgcccctcccgcgaggatgcctagcaataacaacaaccatcaccacagtgcttcccacgccgggtctggtggaccggggtcgacgcctacacaccgatctgccggatccggggaaggctccgcagggggtggtaacggtggtggtggaggtggtggtggtagtggaggaggatccaccgccgcttcgaaacgtcgggaagcgaaccgactcgccgccgctcgattcaggacgaggaagaaggatcaagtcgtcgacctcgaaggcagggtggcggggctcgaacaggagagttcggtcctcaaaggggaagtgaggagtttgcgtggtaaactgggtctcgataccgaggttcccgtcgtcgggcctatcgggggtcaaggttccggtggggcggtgatcagtgtgagtatgcaggagagggtagggaccccgttgttgggcggggggagtcatgcggatagtccagggatgggcagtcatcggagtctcaattcgatgggcccaggtgacgaagacgaggacgaagagatggatctcgccgcgagttcgaaaaagaggagaaaggtcggagggcgcggaggtaccggtgcgggtagtggggatggcgccaacgaggaagagatgcttcagctcaaggagcagttgcgggggtaccaggccacgatgagggtcatgcaagaggaaattgccttgctcaaggggaagaaaccgtcggtgggttcggggccatgtcgatgattcggtacaacgtacatcactgacgatccgcacgcgacctctcgtctagtctatgggcaggacaccttcgttcaccctcgacccgtccttggcagacgtcaaaccaggtgcttatacccaacaccatcgatcgtccggccgatctgccagcggaggttcgtcccgacactatgttcagcactcggattcggccacctcgaacgatctcgccgacgacgccatggcagctcaaggtctcgcttcgctgcatctccctctcccccgtccggggtacgagaggggggatacgggcacgtcatctcatctgagcttgccgccgctctcacccgtcttgcggatcgattcggcttcaccggggaacgagtacgagggtgagagcgcccggggtggcggttacacgaccgggtcgcatggaggtgggacgtcggtcatgatgggtcgttcgatccacggtctacccacatcccgacctcattcccctttgagcttgtcacccgcgctccctcaacccggtcgaccgacgagtccgatgtcgatcgagaggctctcttccccctccccgctaggagccaattacaaggactcttcatccgcagcgaggacgttgaacgctctacagaacgccgctttcgccgtaggcatgcagctcggcggcggatctggaccttcttccccgctcggtgccgcgtccggtcgggaatctccattggcgaggaaccgttcgtgggggctcggaggggccacgcctagcggtctcggattggcttccctaccccactcccgggctggtagtcggggcctcgattccccgatcagcgccgagaggagcggggccaatgatgatgacgattcgcccgacagtggtgggtatgctcaggattactttgggaggtacgctgcgggtgccaatgccgcgggcgcgagtggggccgggacaggccagcaaggcgggagtcgattgagggaggaacgtgatttcgaaaagaccgaggacggggaagacgacgtgaccccacccgccaaggccacggggggtcggtcgaaaaaggtcgtcgaggtcgatcctagtcttctcgacgatgatgacgaggacgacggacggaaaccgatcgacggagacgtcaaggaggaagacatggaggtcgatacgcgatgagcacggctttcatctcggactttgccttcccccccgtctttccctctgtcgaaccgccggcctggcccgccttggatccatctttgatctcgttgtctctgtgcgtttcgcgcttcaccccatcttcgcgttcaacacctcgtcatcgacttttctttcgtctacttttatctcttccttgtcttttcctttgtatggttaaacacgctagttttgtcgctgtggatatgactcgtattgcgaaatcgaatgatatatcagatcgagtacgactttatcgacaactagttgtcgagtagtcaccgcattttgcacgtcccaagtcgccgccgcgtcaacgccggatagatgccgtccgcagttccgtacagcgttgttataactactactctactgttgtagatgccaagtagccacttacaatcacaggagtagactgtattgacgcttagcagtgacgagtcatacgctgacgagtcatacgcctagataaataacctagacatccacaagatgctcaaacgattggcttccgcattcacgactcccgcggccacacctcctcgatcgagctcgcctgaaccaccctcgacggccaatcccgtcgatcctaatacccacgccggtcgagtcgatgtcgaacgtgatctcgctcgagccctacgagagcaaggtgtaccgaccaccgaggaggactgctttgcatgtgatgcggattgcgacgaagatgagcatgtaggagcgcagtatgagagttatccccgtggtttcgacgtcgattgggacagtgacctgctgggcagcgccaacccggcccctcggaatgcaagttggaacgagcgggaacagcggcactgtggcccataagctgacctgaactctcccacgtctcgcagctagtcgtttcgaccgctcgatcggattgggaacacgaccacacgaccgatacctcgaccttgtcataccaccttcaaacaatcctcaacgccgagcgtggattcccgccccctggaacccctatggatcccccacctgggaaaggcaaagactccaaacccgccaaggaaactccgaaaccggccgcagacgaacccatcaagccggctaaaccgcctggccagatcgacctcgtcatcgggaaggacggtctccctcaaggactctctgaaacccctcggacggagctcgaatccacttcccccgacgctaaacaaccgccgacgagcttgttctcttcctcgctcatctcgcaatctccggacgaggacaaggagagcgtgatgatcttccccgagtgggagatcgttgccgaagtccccaactcgagtacgggtgccaaagaggtcttgggcgggttgaacgggcggaagaacgagctcaagagttggacactgccttacagggccgtcgtgctcctgtgtagtcacaagaagagggacaagcgatgtcacatcgctgcgcccttgttggaaaaggtcagtccccgtctccctggcttacatccgtgtagcgatccgatcgacctgatatattcactcgctcggtaccctcccaggcgctcgtacatgaactcgagtcgcaccacgtctcgatcgatacccggggagactctttaaacccgcaccatctcgtcgatcttcacccggccttgaatgaagccggatcgcaggaagaacgagcgaaagaacgggaagcccgattgagggcgatcgacgggttgggggatgagcagggaaatggcgaggtcgggatcttcaagattagtcatttgggtcagtctcatgccttgagaacgagagggagtcggaaggatgtcgagactgacatgatatgttttgggacggtcattcaggcgggcatcgatactctggggtcatgattgtgggacaatttcacatcttcagtcagagtctcatagaattgtcgctaatctatcgcctttgtccaccccttccagatcctcttcccatcaggtgctaccctgtactacggccgggtcagccctaaagacattcctcacgtcgtcaaagagaccattttgaagggtcaggtcattgccgggcttatgcgtggaggcaacaacgtcatccgagaggaactaaagggtagtccctcttctgcaagcacatgtgctaccaaaaagggcaagtctctgttgacttggtagaaatggaacgcctgcggaacggctagacgctggtggagaggtcgatctcatagtattttcgcctatgtagctatatttacaattcttgtctttgggccgcgggatggccgtctaatatatgatgggagggtgagggtattattatacagatgcccaaagtcgccgttacgaccctggtcatatgctggccatgctgagtcgttcacgctcgtaccgacgcggtcacaatcaatgcttcgtgcggacgggttcaccgttttcgaggggcaagtgctcttgcaaccttttgaggaggggttcgttggcaaacacttcgtgcaagacctgtctagcatcgtccacaaagacgaattcgataccctccttgacgctgggcggaacgttttcgtcaatgtccgatttgcatgctgctgggacaatgagttctagaagacgcgaggcacagtcagactcgctggtcatcgataagactcgactcagatagggcttactcttcattcctgctcggtgcgcagcgagactgtgtagtgaagagagaggtcataagtggacaatcctctatggcgaatcaagcgaaatcgcttacatcttttccttgagtccaccgaccggcaagacttgaccgagtagtgtgatctcaccggtcaaggctatggagacagaagctgcataagtcggaggcaaacttggcggaaagcggctagcatcgaaatgactcaccaaagttggggtcgaccttggtcttggtaaagagcgaaacgaaagcggacagcagggcggtacccgcgctgggtccctccttgccaattccaccttcaggcatctgcagtttggagattgtaccgtcagtacgattactaatcgagtgcgaacaagctgtaatcggctactcacgtgcaagtgaatatcacggtcctgtaagaagaggtcggacgcgctggaggtgatacccaatgcaaaggcgttcgacttgacccagctcaaagcgatttgagccgactctcgaatgacctcgccgagctttccggtcagctgcaagttgccctttccaggcatcgactacgaggtgaaagaacgtcgagttcagccggccgtagcccaagacccggttcatgctataccgactcacagtagcttcaatgggcatgaccgacccggaaccgttgcccaggtaacccaaaccggtgctgactcccgccgggggagccttgacgtacaacctatccttgtggtagacagcgggtccgacatagtccttgaggttgtcggtcgtgatgtggaccgagacgtcgctaggcaccttcatggacgccctgggtgccgtgctgacctttttctcggtaccgggttcgccaggagcgggagcatcgtcgctgggcaagcgttccgaggcgggcttgacgtcgggtcgttgcgattcgaccgtgccagcggcttcagtagcggtcaccttgggaggctcgggcaaacccttctcgccgaggtccgtaacgatcttgaacgccgcctttcggtaaatctaccaggtcgattgaggcaatgagcttccatggtcggaaaatcacaactggcaacttcgaaggctcactttgtcaatgtgctttttcagatttcggacaccactttcccgacagtagtaccggatgagggcctcgatggcgccggggtcgagcttgatgtcagtctcgcccaacccgttggcctccttggcttggggcgcgaggtatcgatcggcaatggcgagcttttcatcggccacgtagccgctgacttctaggacttccatccggtcgagcaagggagcagggatcgtgtcgaggttgttggctgcgaaaagtcggatatacgtcagtccagcacaagggcggaatttgtcaaccgtaaagagtgctcaccagtgcaaacaaacaaaacgcgggacaggtcaacgggaacgtccatgctgcagatgtcgtcaaagcgtgttagccggttgacgcagacgcggctgatgctggcaggacgtactagtggtccaagaacgacccgttctgttctgggtcgagcatctccaagagcgcgctcgagggatcaccgttgtgacctcgaccgaccttgtcaatctcgtcgatcaggatgagcgggttctcggtcccaacctttttcaacgcctggataggtttacccggcatggctctaggcatttgagcacattgtcgatcattaaatcggcccgaggctagattcaaagccagagtcattgctcacccgatataagtcctcctgtgacccttgatctcggcgacgtcggtcagacctccgactgagaatcggtagaattgcctgtccaacgccctggcgatcgatttcccgatactcgtctttcccacaccggggggtccgaccatgcagatgatcttgccctcgacggtacctcggagtttaccgacggcgaggaactcgaggatcctgtccttgacatccttgagaccgtagtgatcctcgtcgagtaccttgacggcgtgagcaatgtcaaagttttcagacgagtgaacgccccaaggaatctgggtcaaccagtcgaggtagtttcgagtgacgctgcaatgtcgaaaagatcagtcccgccgccgtgataagcatcaaccttttaactggacctacttgaactcgctggcggccggttcgaggtgcatgagcttgttgatctcttcatcaaaaacgtgcttgacgccctctggcatggccaatttgcccgccttttccttgaacccctcgacgagcttgtccttgccgtcgctatccatgcccaactcctttttgatccccttgagctgttccatcaggtagacctctcgttgacgcttgtgcagcttggtctcgacgtccctagcgatcttgctctgcaactgagcgttgatgagttcctttttcaggatggtcaaggccttttgcaatcggtcctgcacggacaacgactcgaggactccctgcagttcttggacgtcacccgacgagacggccgctgcgaaatctgccaacttgtctggatcgtcaaagacgttggagctgctctggttgatggtaaacgaggtgatctgttcccggaagatgggcgcgagctgggcaatatccttgaacacgctgagcaactcgttcatgacggccttgatcatctgatcgtccttgttgaatggctcgaggtcgaggttggagacgttggtcagcgagatttcggggaccatcgagtggaggaatgagatgtgcgattgaggcgcggccgcggtatcggatggcgacgtcgacgaggccgacttgggatgcatgtcctgctcgatctcttcgacggtgggcacgtcggccaattcaaagcttgctacctcggcctctggtttacccacttcgcttcgggggctcgaaggctcgatgacctcgctcggcttttccgctccgtccaacgaggacgccgccgcgggacgctgagtcaacagctcatcgatcctgatccttcgatgcgggtagaggaccgccgtcaacgattccttcttgtcctgatcgcccgtggcgatcgtcttgccgtcctgcccgaccccaccatcgcctgctccaaagacgctggtgatctgagcgaatacgccgacggggtagacctggtcgggcgaggtgatgacgtccgagtcggcgttgctatccttgagcaagaacgcgccgatgtacggttgaccccgttgaagcaaggtccggatggccttgatcacgggtggcgaggtgatggtgacggccttgtagaaacctgcaatgacgccaaggatgggtagtgaacagcatgtcagcacctcggtcatcgtgtcaccattcgccccgatcgtcagcaggctaggacttaccaggaaagagaggtctcctggtgataggcagggccaagacctgcgggtactcgtccgggatggacaccttggcgacctccttgcccgtctttggcggaggaggtgcgtctccaccatcaccgttgttccccgaattgcccgaattgccgttgttccccgagttgccaccgctactgctggctccgttgttgttcgagttgaagctcgagggcgagttttcctggttgttcgacagcgatgccgagggggatgatgatgacgcgggcgctcctgctgctgctgctgttgacgagctcgatcgtcgacccttcgctgccgccgaggacgacgtcgacgacgccgacgacgatgcctgtcgatcatgttcctgttcgagctcgagctcgacctcttcatgctccagaggactctttggctcatccatcttgcctcccttactgctcgtcttttttgcctgcccgacgtccattccatccaggctcattccgacgtcgacaccatcctggacgaacccttcgtcctgatcccaaggttgtgcctcgccccgtttggaaaggggttcgtccgggaagatcaactcggaggcgtctacagcgagatccctatctgatccgaagatggcgtccgctttcgtcttgctagggacgacggtctcagcgctggcctcgacttggtcgacgtcggcggtatccttggtggtcccacccgaggtgatgacctcctcgcctccaccctggacgggcttgtcaccccgcttgacctctttcgccgggcgttggttgacccactttttctccggattcccctgggtcgccgaagtcttgagcgtacgtctcgatgaggatgaggacgtcgcattgagtgacgaggtggagctggaggcggggtgggaaaatagggaaagaccggtcgagacgaggggagaggtcgagctgctatacaacgccgacgcaggacggaggagcagcggggtgcggcttcggaggaccgaacggagggggagcatcgtatgggggtgctacgactttatagggtcggtcggtcgtatatggggggaagatgtggtcgtgaacgatcgtcgcctcgcgatgtataagatatgaggtgtcgttgtcgttgtcgactcgggaggcgatgaggatcgtcgggtctagttgatacttgtagtccgacagggtgtgtggtggcctggtggtttcttggtgtttcgtatttgattgcaattctcgattctattgttcgatcgagagagacacgcacacacacgattgactataagctatggtcgaggtcgtctgaacaataagccaagctgctgctgctgctgctgctgctcgcacccgggggtacgatacgatcgaggtttggatgggaacagcagcttcggccgatcgcgcaggggggcagggcagggcaggaggggacaattgagctgagactcccagtcaaccaccttcccccttgatggtttcatcatcgctcgcctcgatggatcgcttcgtaatcgctcaatccctaggtgatgatcacgtgatcgctcactcactcgcttgctggctgtttcgggtggaaacatctagattagattcctcgtaatcaccaccccaatctcagccaaggagagagaccggaccggtaacgggcgtcattcgtcacgtcaaatagcactcaccaccatctttcatttaccacccacggccattcccatctcgaccaacctctgacttttataggtatcggtataggttagaagataacagtacctaccacgatggactggctagacgttccctttgaaagggcgtccccgctcattggagcgcctcccgatcatctcaaggtgaggacatgccgcgcagaggaccagcaaggaggaaaaccagtcgacatgtgctgattctccaataatggctactcgttcgctactcccccgactcgatcgttcttttcgtaacacgtctcgcatcctcgacgcttcctccccccccactccgcctcgcccttgtcctccccacagctcatcttcatcctcatcagctcctaccccctcgcccacatctacacccgcctccccacccactcccctcagatcaaacacctctactcgatcatcctcacctcgttctacctcgtaggcatgttcaggatgaaatggggttacatccagttggtactcgacgctggggtgacttggggaatcgtcgtcggcaagatcggggtcagggaggatggaaggggggaaggatggatgccgtggttggtctttgggtgagtcgagatgacgttccgggattccgttgttttggaggactcggaggctgatattcgtacttcactgcgccgtcgcttctggtctagcttgatgatgggtcatctgactatcaagtgagcttccctgcttccaagtcattccaactctgctgacactctgttcgacccgcgctcgccgacccacacagccacgcatatcgcgcgttcaccgacattcccgattcggtcatggagatcaccgccatgcagatggtcactacgatgaaactcgtcactttcgcttggaatgtcgaggacggtcgcaactatgtcgaaccgggtactgtaaaacccggatcgagctcgagctcgaccacaatgtcccagctcgatcccgcgctcgcagctacccgtctcccaccgtcgaggatccccagcttgctcccctttctcggctacgtcctcttcttcccctcgctcatcggcccagcctcggattacgccagttacgaagctttggtcgatgggagcttgttcaccgctcctccgggtaccaacgaagccagtagaaaggccgccagtgtcaacgcacagagggaaagggcggggaacaaggtcgacgtccgtcagcccaagtccgacgaggacgacgatcccgaattggaacacctcgtccattccctccgacccggatccacacgcgcgctcatcccccgaggcaggaaatccacggcttaccggaaactcgtcaccgggttgatcatgctcgggatctacgccgtctttggtgggaaatggggttacgcgaggatcatcgatcaggctccccagatggtcggttggtgggcttccaaggggtggatcgggaaatgggtgtacatcctgcgcgctgggttcatcgcgaggacaaagtattacgccttgtggagcgtcagcgaggtgagtcgtcgacgtcgtcgtcgtcgccgtggtccccgccctcgtccgcatcccttggtcaccgggtcgactgatgacgagtgatcgccctcctttcgtggcagggcgcatgcatcctcaccgggatcggattcaacgggtacgacacccgctcgtccccctcggaacgtcccaaggcgctctgggaccgcgtcgagaatatcgacatttggaaaatcgagacggctcagagcttcaaggtcttgtttgacagttggaactgtcgcgccaatgtgagctttttagatcgaccccgaaacgctcgagcgggtcatcgaatccgaagctgatccgtcgtctggtaccggtcggtattgtaggtctggttgagggatacgatctataaacgattgatcaagccggggcagaaaccgggattctcgagcaccgtcatgacgtttgtcacgagcgccttttgggtgagtgcagcggagatttacattctgttgcgaggaagagatacgggtctgactgatagactcctggtttacagcacgggatcgcaccgggatactatcgtgagtcaccagtcctcttcgacctggtctctttcgtcgtgcctgacaagcaagacgactgacattgcgggctcgtgcggtcattctcctgtttgcctcttgttcccgccacgtcacagtcgcttttatcacggctggcgtgtgcacctcgctcggtcgtcagatgcgtcacctcgtccggccctttttcctacccgaaaacaacgcttcccgctcgaccgtacccaaacagatctacgacgtcctctcctggctcgccgtctcaagtttgatcaactacactgtcgccgcgttcttgttgctctcgtggcacgattgcttgctcgtctggaaacggatgggctggtacggccacatcgtcatcggcgtggtctgggtggcgctcaagtatggaggggcgcgatggttgaaacaggccaacgcccaagccgggagatcgggtccgaaaaagtccaagtaggagcgggaaaaacaggacctttggggtatccatcatagttcagatctgccatctacggatggaacgggtagcctacctcggtgacctcacaaagccattacggtctggacggctagttggtcggattgtgatctggcgagggttttgttttgtttttcgaacgaaatatgtttccggttttgcctccggtctcacggactgagtagaccattaaatatcacgatcatcccctccaattacaactactcacaactactctagctacactacaactctactctacaagcactatatcttacttttgatttctgatcagactgagctacagggtgtacgaacctcactcgtcgtcggcatatcggtccccctggccaaccagtcagccctcgcttgccccatggagaaggcttctcaatatgggtcgtcatggtatcgacctttcgtacgccatcgaaccccttgatgcccttactgaaagggactttcgtgtggacgtcggggcacgggaccctaggatgttcgcgaacgaggacctgaatgagactgatttgatccgattgaggtaccccgaaaggctgggatcaggacaaccgatgaactcgcccaggaaaaaggcggtccaggacctagaggaagtaaaacgagctctcgagccgatttcacaatcgtttcgacgcgattcccgtgacacggatgaaacgagttcgagcgaggtaacgggttcaatagcttgcgagctcaacaggagccgctttgacccccgtgtgatccaagtgcatgctggggatcaccagggatacttcgaagatatcgccaaaaagatgggcaccaaaggcaacccactctccgaggcggttcaaccctttatcgacaaagcctcgcatccccttctcaaggaaacggaacttcaggagaaggcatacatcttgttcaatgctttgcataagtggatctggacggaccatcgctcccaggagggtccttatcgaccagtatttatctccttaggtgaaaaggccgtgatcaacgagcctgaaggtgtttctacatttgataatggccaactgatacatccgtccgacaaggtcggtttgactttcaagccggattggatactggaccttcttcgctcgaagccgatcgccgatctggggtatgactggtgtctctcggcaggccacggcgaaaccaaactacgagcgtccagagacattactctgaaactctttcatcaaatccaacgaagccaagtaaatccgggtgatggctccgattctgactgttcctcagatcgatgctgaccgaagcaccgatacttttgaacgaaaacaaaaggttagcgagataaaaaatcatcctatcacaggagagcttcttagtttctcgctgtgtggattcattcttcgcatcgtctatatcgacccattgcggttcggtacttctaggggttacgatctgtcagagccggaggactgggtcgagattatcaagatcgtcgctctcttctcgggaccggtctcgagctacttcaaatattggcgtccgacagttcaagagacgctcaagatcaagactctgtgcggacatgagctacgagtcacgttcgacactgtccaaatccttgacaaacggtacgacccgtacggcagacgttccactgtttggtcctgcgaagtcaaagacgtcaagcagtttgatggttacggagaggagacggaagtggatcctcgattcaaacccgatagttcagaagtttacgtcataaaggcctcctggttactaccccagtttgccgatcatgagcaggcagtctacgagcacatcgaaaaaggcgatcagcgagagcacgaacggaacgaattccagcgagatcctgaagtcgccatcccagtattcatcggtactgtgatcgactcagatctcgcaaagaagacgctggggccaacatcgctgaaggaatggcggaccatgtctcatactattactcctgaagatcctgaaagctcgctagagcacgctcgccttaccgtctttgccacgaagtgtttcaaggccggtaccattattggtaccactttgcctttggccagcctcatcacggtttatcgcaaactcttcaagaccttgaaatacctcgccagaagaggtatatattatcgttacatcaaccttggaagcgtcttgcgagacattctcaccgggacaaggtccttgttagtcgactttgactttgcacgcatcggtatgacgagacgcggcgattccgctttgaaggagtctcagccatgggaaacgagcatggacgactgcgtgtctggaaacttgatgttcatgtcgacgttcgtgcaacaaggtcgtcaaaagaatgccgaatatcgtgtgcaacaacaagctgtgcaggctgtccgtcaaaatatcaagaaacaagagtcaaccagcgtcaaaacgccgaaacagaaggaacgagaagccgacctaacgagacaagagcaattattacaaaatttgaaggatgaaatgcaatcgactgctcatagatatatcgacgactgcgagtcggcaatgtataccttgctttggctggtaagtttggctccgacgactgcgacttgcgaatgccgatttacaattgttcgcttcgcaggtagccgattcacaacatcgaaaaacgggtgttgacgtacccgaaaggctacgcaaccttgatgagttgggtgtcaaggtggcagtctggaaatcgggattgtcatccgtaagttgtcgtttggatgaccgtctgtggaataggctagttgtgttgatgcgatcacgcgcggccgagaatagcttgtcgacgaaatcgacgccaacgacatttggggcacaatgatggaggacatgaacaaagttatccgagaatcacaagaccagttgcgaagtcaaaagatcgtggactcctccttgcacgaaatcgagaccgaatgcttcgatacgtgcgatcgcatcatgcgggaggcgatacaccaacttgagagtgaggaagggtcgatccccgaggtcgacatgtgcgagacgcagcccaaagacgcgcataatcacgaaagaaacgacgatcctacaaacggcgacgatgaagtacgccagtcgaggcagcacagtcgcttgaggccgcgcaaggcggtggtctacaaggagtgaaaatctccatttgcctagtatcgaaaatccgccgagaagaacccagttagaaaatgctctgccacgcctgctcggtacacttgcacgagctcgaaagctggttgtagtgccatgagctcgatcaactcgtctcgtccgagtgataaagttatgattcacgacgatataccctgcagtagtttttttccatacatgtatgtatatatgacacttgacaatgtatcgcttcttttccccctgctcgtcattcgttaaaactccggtcgtgcacgcgactggatactttccagaatcccgatcgccacagtgttacctgggatatccgtccgaactaaccgtgttctgtcagatatgggcaatcttttacccactggccttgccgttacagacagacatggacatcggcgtatggaaagaagatttcaagcagggatgttcgtccttttccaagggagactttgcgcgggcagtcgagatcttctcagaggtacgaggtcacgcccgactgaacctcgatcgccctgcgttacccgcttctgttgaactcacttccaactcgcaggtgttagataagctcactgatgcacgacctcaggatgttatcaaagtgcttgactccaggtcgtccgcatcgatcaagatctctgaattcaagtcggccaaggccgatgctaagcaatgtatcaagctagggccaggcgattacagggtgagacccgtggtagtgcatgttcgttacgtctgctctagtaacactttatccagggctatctgcgtagtgcaaggatctttgcattggaacgacgatatgtagaagccatgcggtttctagatcgagcgaggactctctgcccaccaggcatgaaagaagctgtagagagtctccaaacacaaattcaaggggaacaaaaatccgcagaggttatcgccaacaaactccgccgttccgatcccctctcagtcctgccgctggaagtcttcggaaggatcatcgagatcggtgtcgccgatggcgatcctgacttcgctctcaggccaagttgggtctcaaaacgatggagagaagcggtcatcggcacctcaactgcttggaactcgtttcaatgtgagcctcgacgcagcgcacaggcgaaatgtatggcaggcaaagcccaggcttggcacgagaggtcgaagggccgggttgaagaggtcagaatcgtcatcaaccgcgacatggatctggagcttagctcaaagcccgcggtagtgcgctgcttttcgacttgcacttctgcatggcttctatcttgtcgaaagttttctctgcatggtgacatgaagacggcggcgaaattttgcgaagcgatgcagggacaagatgtgagccagctacaagagttgcatgcaggcgagaagatcgcaaagctcctggccccgccaaacttacgggtattggatatcacgaggattttcgaagcaggatcgaatcccgctgacagcctacctggcatccagtgtattcgacggcttcaaaggttgacgctgaacgtcaagcagttacgggcgtaccatcaggctggtcttctggctggtatgactcgtctcgaagaacttcgtatccgacatttgcccgacgaccagatcacatgccgcatgccgaactgcccctacgggctgttcgctactggtgatttatcagtaccagcacaagacgctatccgttttgctgagctcaaggtgctgcaatctccacccatttggatcgaaaacattcgatgtccaagcctgtctgaactgagattgggcccaggatgctcctgcgacgcctccgcgaccactactgcgttctctcaaaatctatcgggcgctataggccacgtctcggcacagctcgaaacgctcgtcatcgaccgcttcgcactgtacgtggacgtacccgccatcttgccccgtatggtccagctcaagcacctgaatgtcaaaagagctttggtgcgcaatgactctatagaggcaatcatggacgcctatagccacccaaacctggaagaagtggtcatttccgacgcgagggatctcaccggtacgcccctgatgcggatggtcagcaatcgaatcaagctgcagacttcctcgacgacgaatcgtcaagattgcgagtctccgagaccaagcctgattcgccacttgcgtttgtcaaactgcgatgtattggaaaaggaggccgaggagtggctcaagaggaatgttcctgattgtcagatacaacgcatcaggccggcagcacctacctcttatcgagatcgccttgccgcttgaaagtcgcttgaaccgggcgacgcatttcactacaatgccggtaggaaaggtcacagcaagaatccctaattatgaaattgacgagacagacagaatttcacgaccccatgacattgtaatcacgcatctatactgcgacctaataatctattgcctctttttgcctttactcctgttttgttgcggctcccaaaaagcgcgtatggacttggactctgcgatccaatccttacggccagtcatggcggtcaattggcaaatcgcggtcagacaccagaggatcagccaattccaggtcatggccagaggggtggacgccatcaaggctcggaaactttcgatcccagagacgaccgctcgggcgatgggttccctcttgatcgcccgatcggccggtctgatggcgaacgggatctcggcaccaaactgttcgacggccagcttgagacccgaggtaaacccatcctcatggaaaccatagttggtccaagcgcccgcaaacgtgactcggcgagcgttttgtatctcgggcagtcgcgattgcgctcgcacgctctgtcctcacggccgtgatgtcagtcatgttctttgtttggccaaccggagcgagagtttcatgcgacacactgccgacttaccgctgcgctgtacattggatgttcatactgatatcgtccgactattttatccgcatctacctcgaacggagggttcaaagtgaccaagacgggtccgtgatccttgaccggcaatttttgcaagtcattcatgttgtacgttctttggtgtgtcggcgtcggggaatcagtgtcggttcccatcaggtgtatacaaaggttcgtttcgcagcgggggaagggaggaggggggtacgatcgactcacaacgcgacagtgttgacgtccgaagccgttgtacgcggggctccgctcgcattatccgaagacgtcagataattccaagctagcaacgtcgcgattgagggtcaaccctcgatacgaaatgaatcgccgcgtcgcgcgtgcatgtttctactcacccgaccaggctctccgtctgatgggcatgaactgtgagatgtacgcgaacattgctcgattatcatctagccatgacgggggaaatgggaaacgggtcgagctcgacgtgtggacccacccgttcgtcccagtgtagtacggcatcgttcttgctccattcgaacgagccgagaatttcctgttcctcctcactcgacccgccacctgcttgtaaaagtctcagactgatatccgagtgggtcctgcgggatcgagaccagaggacattagccttttttccccgagtatggcgggacctgagcgcctgcagcggcctagtgtcgagctcggactcacgccaggatgacataatcgtattgatgctccctcccgctctcttcgaccaaggtgacgtgatctttgtgtggcgtgacgctcttgatcggggtgttgatgtgcaggttctccttgggcagggactcgaggacggcttcgacgtactttttcctaccaaccgaaggatgatggggaagggagaattgaatcggtcaatcagtgggtcgggtcgggtcttcacgggcagtgactcacgagccaccggcgacggtcaaccaattgggtctcccatcgacctgcatgagatgatgattgtgaaagaaccggatcaacgtctttgccgggaaatccaaggcgcacttgtcggccggagtcgaccagctgtaggtcgtgggcacgtgtccgacgatgagcggggaagacagaatcgatcagccatcatagtagacgtcggtcgactggcggtccgatgtgttcactcacattgccgccgtcatcggctatggttcacgaccacgcccctcgcctggaatcagcctcgatctcgctggatacgatcgttcacgacccgagacttgccaacaagtaatcctccttgaatccatccccatacccacctctttccaagtactcgccgatgctgagatcacgctccacctcgtgcctatcctcgcgcttggtctgggccgtcccttcctgtcctcgttcttgtacgagatcgaggccgaacaagttgaaccgcatgacgtcgagcaacatcctccataacctcgggttcaagaggtttttcctctggatgaacacggtcgacaggttatccccggcccattcaaagagacccttgtctcgcgagacggaaaacgtcatgctcgtcgggatggtccggacgcccttttcggcgagaaaggagagaaagttggggtacgtcggggggttacagacgatctgtccggggcggcaaggtcaattgaggtacgagttcccccggagggtgtttgtgcgagtcactcacgaatccgctagggtgtgacacgcatcgggaaaaaaaggcgggagggcgggccaaaagatgcaaagcgttcgagtcggtgtctttgccccctctctccccccgagctcgagctcgaccatcgactcacgtatccacatccacgctcttctttccctcgcctaaaatatcatgaaccccgcggagttggatatcaccgaaaaaagcacctccatcccgaccgagccgacacgtgactcacgttcaaacgtcaccgtatgggtgtgcccaccgacgtaatccccggcttcgtagatgttgacctcgtgctccgagtgttcgttgagggcctgttttgacgggtgaggggggggatacccgaggccatgggaaggggtgaatccggatgaggatgagggtcaccgaagagggggagggggggcgttggacgcgtagcaataggaggtgaacggagtccacgttcacaaggagagacagtatgattatgaaaaggtcggaagagcgagtcgaccggcgcgttattgggtgtgcaagaagaaagggatgagcaatcagagtaggaggtggtggtggtgatgatgcgaacttacccatagggcggcgatcccggatacgcctgaacctacgatggctatacgtttacgttctttgataggcatctttgggatgtggtgatcaatgtcgtataagaggcagccggcaaggttggcatgggtagggagagagtgagtgagtgagtgtgacacatgttgatcgagatgtccggatgtcctgatggggtcggtgtgtcgatggatcgacgatcaagagcccgcgcgcgcgcgtcgagtcgagtcgagtcgagtcgatgctgatgatgtcaggctcggccaagagcgataaaggcagaggtgaggtgaggttaggcgaggtgagatctctactaaacatcatcaggtcgattgaagctactcaccacgagtgtagagtaagaggagagctccagaggcagcgcttaatcctgggagtgggtattggttgtccttcgggggggaacacgatcgacttggcgacctggacctccttggtctcctgcaaattgacctcggggatcgctagctatgcgagactggcggggggtggaaataaaatgtaaactaccccatcacccccctatctcgagttcaagtagatagatgtactcatgtactcatgtactcatcatcatcatcatcatcatcatcatcatcatcatcatcataccacccaccgacccccatcagatataccagcactcatcaccaccgcgacgagatgatgatcctcctatcgaccctcctcgcactcaccctcctcgactccgcgcacgttcatgccaaacaccgatcgcacatccccgtcagggtagacgaatcacagttgccatcacccaaaggacctctagtgtggggagacgtcaatttcgtccataccaccgatattcacggtgagtcttgctcgcccggatggcgcgtggcgcatgagggtgtagaacgagcaggcgctgctcgttagtctgatcagatcggattcgctgattcgccgactcgtactcgtgctcgtactcgaaccgggtcctcgatcctcggcgctcgataggatggttattgggtcatcaacacgtgagtcagaccgggtcctgtctttctacggagaacgacactcgtattcccgtatttccgaatccgatcccgaataacaagctcatcctcgtctttgtctggttcgggaacgtgacagtctacctggcctgaacctgtgagcaacccccgttaccgacctcgtcgatacaatacgatacgctcgctcaacgaatcctacttttctatttaccagaattattcggccgacaccggcgacctctactctttcctcgcccacctgcgcgcccaggcagaccggaagggggtagacctcttgctcatcgattccggggatcatcatgatgggaccggactcgtctcttaccccgggcccgccaacgcccgcgatcacgatcacaatcacagccacaatcatacggacggatctcccatccacccacacccacaccctcatccgcgttcgcgtcgatcgggagcggccgtggcggatcatcatctggcgaaactagggtacgatgtcctcgccatcgggaatcacgaactgtataaataccccgatgcggcgcaggtggctagggatgtggatggtggggtatgggacaagcgagacggggcccccgtggccgtccctcgttcctctttgcccgctgatccccccggctctcacaatctgggaatttaggatcagcgatgcatccatgatccatggaaacgagtgattcgagtcgtcaacatcaacatggaccatgtcgaggtactcgaacatcgcattaacgtatcacgatcacgatagagtcatccagaccaaacgcgaacgaggatatctcgccatcatcgagattcccaaagttactgtacaacttcgatctgtgatcgatctgtagggccaggaagatatcagcacagggcctactctgcctcgggcactgcgggaacgctaaaccttttctcgcccccaccgtccgggaaacgatcattttgttattcatcgcgctctaatcaaacccgggacatcctttgagatagcgctctctcgggatccactcgatcattatcatcacttcggggcttctagaggaagtttcagtcttgaaataggttcattttgacaaacccggacaactgcgcgcaggacggcggagcagggtccatctttgatcgtagaacgctgatcgactgaaaccatcaagccggccgtctagaacaagcaagagaaagggagaggttccagctttgcttggcaagtagcagcagagcagagcagtatccacctggacccctgaggatatcgacacgtgttgaacgtgacacgggcgtagagagaggggtcgaccccgattgaaacgcagaccattccaagcaagcaagaaagagaagaagaggcgggggagagaggggatcacaggaattgcacatcaaccgacccgacctcatcaggtgacaaggtcatcatcccggtcatatcgatagacagataaagggacggggacccgcaccaagactatataatctcaaacaaatctcccgccccgatcctatttgccatgaatcactacctcccctcgttcactcaacgagcgtggcccaagatggaagtcccacctcaactccaatccgaacttgtcacactcatgcttcacaacaatatccgtcgtgccgaggtcaacacgaccgcgatcaataatgccggtcaggcgggagtgttcagcgggcgggaccctatcgaattcaacagctctcagcccatcaccctcttcatcgtccaactcgtcatcatcatctgtttcacccaagggttgagctcgatcttcaagtacgtccgtcaacccagggtcattgccgaagtcatcggcgggatcatcctcggtccgacggctctaggaaggatccccggattcaccgccaacatcttccctcccgcctcgctctcctacctcaacctgatcgcgaccatcgggctggtcctcttcctcttcctcgtcgggatggaagtcgacgtcggcgtcgtcagaagggattggaaggccgccgtctttgtctctgcggccgggttgatcttgccctttggcgcaggggtcgggatcgccgtggccatctacagagaattcatcgatggcgaggccgtctcgtttggtcatttcttgttgttcgtcggtgtcgccggtgagtccaagtcgtcgaggtgtgcctcagctcgtccccaaactcacccggattgacaacctttgcatctgcctgatccacgcgcacacagcatccatcaccgccttccccgttctctgtaggatcctcaccgagaccaaactcctcgagaccaaagtcgggcagatcgtcctctccgccggggtgggcaacgacgtcgtcggttggatcctcttggccctgaccatcgcgctcgtcaatgccgactcgggggtctcggccgtctacatcctcctctgtgccgtaggttggacgatcgtcgtcctctggcccatgagattgggtttcagatggttgtgcagaaagagcggcagcttcgagggcgaacacgggcccacgccgttcgtcatgctcgtcatgttgaccttggtcttcatctcggcgttcatgacgtgagcaagattgagagagaggcatcgttcgtcccgaagttcgaggttgctaatgtcaaaaccgcatgcgacggtagtgatatcatcggcgtccatcccattttcggagggtttctggtcgggtgagtaccgtcagcttcatgtagctcaatatcacgaagggagaggctgacaagcttgagctcggcatagtatcatcatgccccacgatcacggtttcgcgaccaaggtcacagacaagctcgaagacctgatcggtctgatcttcctgcccatcgcaagtcccatcgttcctggtcactgggaacccgcctcccttactaaagctcttgccgctcgccgctttcgcagtactttgtcctctcggggctcaagaccgatctcggcctgttggacgatggcaaggcgtggggatacaccatcgctatcatcgtcgtcgccttttccggcaaattctttggatgcgccggagcagcctggatgctcaagtttaacaagcgcgaatcgttggcgatcgggaccttgatgagttgtaagggattggtcgaattgatcggtaagctgcaaaccgatacgaggcgctcgggatgatgagcttggactgacctggagcggaacgttgacagtgttgaacgtcggtctggccgctgggatcctcgatacgaccgtattctccatgtttgtcgtcatggccgtcgtcttgacggtcgtcaccacacctctgacgctgtgggtatacccaccgaaataccgaacagccgctattgaccccagggctgagaaacgggccactgctggagctgcgggggccgtgaccggatcggaagggtttggcggtgccagcaacaccacctcgaggttcatgatggtcctttcccgcatggaacatctatctacagccatgttctttacccaactctttgcaacgagtggatccaccaaccaagtcacaccccgactcggcaacgcgccgttgggtaccatcgacgagaagagcaagatccatgaagtcgatagcgcttcggacaacgatacttccgacgaccatacacctgtgactcttgctgggcaaatccctcgtcaacaatggaatgcccatcgtctcatcgaactcacgggaaggacgctcagtgtcatgcaatcgatcgagtctgactcccacgctcgcaccgacgacctgctgcaactttatcgatcgttctccgcactgaggggaatcaacgtggacacgggactagacgtcgtcgaacaagagtcgtttgccgagatcgtcacgcgaagggcagacgaggcgggttctcagctgctcgtcattccctggactgttcccgaatcgggtgcgacggccgcagtcctggacgaaaggaaggacttgaactcatcgaccggcggttcgagcagccggccgaacacccccaggaccaatactttcgatcacatctttagcagcgagaaatcgggcctctatacttatttcctccgccgtgtattttccgactgccacaaaaacgtcgccgttgtcgtagatcgcggtttcgcagctgtcaacaacgtcgctaacggaaatggtggccagcacttgctactgccattccttggtggacccgatgaccgcctcgcgctaagcctctgcatccaactatgccatcaagcgaacgtttctgctacggtcatccgagtcgacaataacccgacaacatcgatcgcttcgccggcccctgccgagaggaaacggaccgtgtcttccgtctcgatggaagaaagcgtccgtgctcatcagaccgctcttgacgctaatcagctgactatcagggtaagttcgctcgccggcaacatgcagatcgaggtgtggtaaactgatttcaagttcttgcaggcgactccctcgcgagccaatggcatgcagtcgtccgtcgccgatcaagacatctggcagcggtataccggcgagaccgaagtcgcggaattgccctcctccactcgtgacgctttgtcccgcataacgttcacggctctctccacaacacaacccctacagactgtcattgagaaggctaattatgccatcgatcagaacggacgcgcttcgtggcgacccctccttgtcattgcaggtcgcgggcgggtcgagtacagtccggcatcgacgttaagccgggaaatggccaagctattgtcctcccagggacaacttccggatgtcggcgccgagatccgcaagaccatcggggatatcgccacagcgttggccgtctccacgtctgcctcgatcatggtcgtgcaggccggttccgaggtcgctcacgaggcggtctaaatcaagatggaacctgacatgaccctagatgttcgtgtatacctttcctgcctgtgttcccgcttgcctgcaagtttctcaaagtataccttgtatcgtagaagtatcctgtaagaccgtacctgacagctgtttcggacagatctgtcgacaagacgcctccttgtgaccgaatgaattcattacgatattcccgaatgcatctaagacgtgaagcgatatacaacagcagtaaatacctctcggcaatctcgtcaatgttgcagctttgactctggcgcgatctccgttcttcgatcgatcgagacgataccccatcttcggacgctcaaattgacgatgcttccaaagaacaatgcgatcagggtcgacgtcatgatgatgacgttgtaaggcatgctgaagtccggcgtgggcagatcgacaagcaattttgacgtgtagagtcgaagccttcttgcatgagcactgccatacgccccaatcgccccgtccaccaagtagacgatcgctggaggcaactcccaacctcgactggcatcgggcaaatgttcggtatatctgatgtattccttggagaatgggatccggatttcgacctcacttttggcggggatctcgagctgcaactgcagtaccgtgggccgacttcgcggtattgaagggtgcaaagtcatggcttgaagtacgtcatctgagaaatagcctgttcgttagcacaaccgatccattctcggaacgagatttacttgcctttggagccgctaggtgagctgattttgatctcgctgatccatagcctaatccaccatggcaattcttcggtataaaccacgtgttgaatcgtctcgtcgtcgttcgttattttggtgtagaatctcgagttcgagtgcgtcgagcccaacagggtgcgcgcgaccgaaattcccttctgagcaatgcgggctgtatgtgatggatgtcaattgttgattctgagtcgagaacgcttcaggtcttggcgtaccggcgttgcccacaacacgcagcttgatatccttcccggtgagcaatcggtcgagcgtccaattgaggcctccatcgggatggacagcgccagcgtcatccagaatcgtcactttggtgccagagtgaggtgacactactatccgagatgaagcggcagcgggacatgcagccggaagtacacggtcgaagatcgaggatatcgaaaagtctggatcaagggacaatcaaatcagactgacgcgatgatgttagaaagtcgagaatctcacctagatttttcgcgtcttccaccttacccttcgtgagatcaaccacagcttcccacctgagtcccaggtttgtcttgcctgcgtgatcgacataatctacgcccatagcgtgccattcatgggccagcaagacatatggtttcatcaaagccgagaggcccgagagccctttgcacggtaagagcttgagaaagggtgtcaaattctcggtgcaaagattctcggccggcaactgcgcgtgtcgaaacgatagccctacaaaaagggggtggaagtcagcttggaacctgcttcactccatgtcagcagctttaccctcggtgtttgagtcggggaatatatcttcaggcgaagccgtgatggatgcgtcgatctggccaagagacgagcagaaaagtccggccaaggaattggtcatggtcttccagtggtcttcaggactaaagcgtacaggcaatcttcagaatagtcctcgccagacgcaacggacccccctcactcttcgtccctgaaccaagctctcagttccgccccggtgccggctacttccggatgctgcggctggccccactggttcgtcttccaacgaccggtcactagggatagatgcatctccgacacgttgttgtgttgaagagggagcagcagactgggaggtgcaagtcggaaatgttcactcgctgtcggaagcacggtcgaggtcagacaggtatgagcgagactcgactcgtcgatcagcatacctgaaggagcctcgatacggaaatcgaagagaagagacattttcccatccggaagaggcctgagggtcaactcctctgaatacctctgccctgcaacaccgccaatcttgaccgaaagcatgacgacggagaaaaaggcttgcaggaaccttttgtatacgctctttgcgtttggccgccttcctctcgtggaggtagacgattcgagcccgggtgtttcaagtccgtcctcaacagaagctgatacgtctacaaaacgcgaacgagcttgaagagcttgtatcacgcactacatgagcgaaagtcatcagtccgaaaggccgacgtgagaaccgcccgaattgtacttgcgataggatagatgatagcgaagacaactatgctggccatgaacggtacgaaggcgcacatcatggccggcacaacccctgcaatcggaaagcgagttagatattggtcaaacggcgtctgtcaggccagtcctcttgcactctctgcttaccaaagccgatgaaatatggcagcctgccatcgacgaaatatctgccgatggcgtacaacgaatatcctcgcgtcttaaagctcggtctataggtgaacggactagataaggtccaaagaacggtcgtttagagcaagtctagactcactcgaaacagtaatacgcgtctaccaaacacgtaatcatcaacgagataggtgctccaaggaagggtacttgtgacaggatcaagccgacgatggtggaagagccgatgatcaagaaacgcggcagcaaggcaatgacacgatccgacaagctgtcgggtcaaggcatatcagcacggatcaagcctgactagctgcatttgatatgacttactcaagagagtccgtctcgggtacagacgttgcgctgcctcgtgaggaggaaggttgcatgctcagggcccgttttgatatcgccctggaccaaaacgtctggaaatgagagacaaagttggtggacagtctctttgccatgtctcgtatattggctcacgttcacccagaagcagaatccaaacacgggatacttccacaagatatcgaacaccaggcggactcgtttcgtccgagctgctaccaaagccgatgcgtgattgtgctgtaagcttggcagcagaagaaagtcaaagaccacgatagacagcaatgcgatcaggttgacagcgctgatgaggaagtttgacaagttagcaagaagaaacccttggctattcagtcagacctagactgacgtcgatttgatgactggaaggattcgagaagaatgggtatgagtaatctacagtcacatcgtggtagcacgatccataccgagtgaacgcaactcggcatccctgtcatacgatgaacagaacatcagacccgatagcggacatcaccgacactatgttgacgtaccgctgtatcgcagccaaagatctatcgacccgagaggcatcctcgaacccgtccactagctgcttgccaattctctgcagctggcgaacatagtcgcccttgaccacgatgccgtcaacaggttccctcttttcgctcaaggcgaaatagctttgctgagctccagccgaggaagagtatccttgatacgtattcccggtatacggtgtcaatggtactgggctggtggcattatctgtgtttgttcgtcgacgcagttgtggaggaggggtcgagatgaaggcagcttcatccagcacgtgggcccgccgtccgttggttctgcgttgcatatcttagaatcaacacaccgagcgaaactaatgctatacgagacggtgctcagtcccaagcacatgtaacttggctgttctacgttccgacgccaagtcgaggtcactcctagctgttcgtgagtctcatagctctgcatgacgcgaaagtggaggtttcacaattctgatgggcagaatacatcctggacgagggcttgaccgctcggtccatcagacatgcatacgtgcgaaaacctggcaacgccggtcgtaaatgagtaattatgtggatacaattcgccttctaggctcggccgaacgtctaatgctcctttcccttcatcacgccgtgacccctgtgcttgccttcttttttacggctggcgaagtaaggcgacgcggtcggggatttatgcttcgttcgttgccgcctgatctctttgcctttgcgtccaggcgatgcatgaccgagtgtgcctcgaacatgagactggggagatctgcctttgtttttggctacgggctcaaagcttccaccccagctaccgtgctccggtgcgccgtcggtctgatctgcctccctaccgttcgaccctgttgcctgctcatctgcccacccgtcctcctcgtcggtagcatctcgatcctcgggcgatgcgggccgaggcttcccagcgtaaaagtctgcgccttgcacgggctggaacttcgcattccccgctcgagccttcttcgcctgagccgtccccacctcgaccggaactccctcgtctagcgcgtcctctctcgatctcttcattccccggtgttcgttggcctgcatcgtcttcctcgcaatgacggcttgagcttgttctgcctctgcacgtcgcgcgtgtgactgcgaagtaccgggctcatcgaatgcaggcccgttctcagttgcgccgtacgaacggcccagatcaggtcggccttgcttggctgaactagctgctttggccttggccgactggccaatagcttcggcgagcctatcgccggattttctaatatagtggagctgataagtatttcgtttgtcgtccaaagataggtgtggctggatggagacgtccgaatcgtccatcttgcaccattccttcctggcgttcttcacgatggaaatgtaatgtccgttgttgggtccagatccgtaatggagggtgacaccgtacaattcgtactcgatgcgtcctccctcgtaaatagggctggtgagtacgagcttttcttcaaagttgatcggttgcgtaagcttcttgccgaatggcgagaatcgtttcaaatggagcgagagtacgggaggtgattggacgactctcattgtcttgaccgcgacgacttgtttgttacatctggacagcgtgcgagaacgtcagctcgagatcgacctgccagtgtgaagctgtcagaactcacttttcacacttgtacttgttcctgccttccaacttgtcctccctggcaaacccttttaaagcttcttgcaccgacctcgtgtccctcgcgatatccagactcagatcgagaaaggtatcgaaagtgtcgctgttggctccacacgaggtgcagtgcactctcgatcgcagacgtcctccccaaaccttgtgtacccaactcgtctcgcgaacagaatgcggtgctttgctgtaatcgtgagtcggacgtcgctcagtactgggatgttagggtaagagataaatcgactcacgttgctccaagctcgcgaagattttcgttctgtagcgcatctacgctgtaccggaaaaactcgtgagagtcctcctgtctaccccggcgcattgttgggcagatacctgagtaagaacgatcacccgattcgtcagatacggtcaccggtcaattaggaagagtcaataagaattcactcttgacattcgaagttatcgctgccgggttatgtgttcccctgcctgaacgccagacggcttgtttggtagtcttcaattcgcaggtcaggcagatcttgccgttgcgtcctatagatagagaacacttgacgatcagctcgataccgcgggatctcacgagcaagatggacatacgatgatttccgtcgtggccgctcagatcatccaacatcctcaacagaggaggcgtatgcatcatgacttgcaagaccgaattggcgaaacaagtgttgcccatattttgtagacccgaggcacgattgtagttgccttgatgaggccatctggtctcgactgctttagggtgcaagtcgtgatcactcggtacggtattatcggcgtccgtagcggtggaagccgtagagacgggcgttccggtacggctgatgggcgactctccataggagaacgaactctgaaatcgccaatacacaaggattggcacgagattgagcaagctactattttgaagccacacagcggaaatgtcgaacacaccttggtcaggccagctagaccgcttccgttctcattcgaagatccagtatttaacgccttgtactttagctcaggatggacatcatccttattgtcataacgagtaaactgaatgggcgtctgcagcagtccctggatcatggcgccgaaatcgttccagtgcttcttgacctgctctgatgatgccgcaggggctccgttttcttggcctcctgaaccattgacgtgtccgttcatcttcttgctcgaggattctaccactttgaaagcgtggggggaaggtttgacgacgggggatgaagcggtatgatgaattttggttgaatggatggatggcaaggtctggaccgaggtcatcctagacgatgcagccgagcgaacgaagagcagaccgtacagatcgcgagcgagctatatctatgggcaccgtgcggcgtagcgactccaagatccaattcggagctggtacgcagacaggctgtgacgatccgatatgcctgtcgagatatcaccacctctcaccaccaccatcctggctcctctgagatcattttccgacggctggcggcgcaaaatctcgagcttttgcccgcgtcaacgcgtttgcctcgctcccgtaagcgaatttggttttgcttccgcatcggcggcgcgtctgaccaaaatctcgaaccgttgttcttcaagcgacgcgtttcatctctcttgattctaggaagatgcgttggtatgtatacaacttggggcttcttccactgacgctctcctaggctatgacgatgcttgtactaggtatgctgattcttaagcgctggtaaggaaaggatgtagcaacgcgtcccttgcgctcaaccttttggccgggtccaacatcaaagccttttccagcaaatcgacaaaattggtcaacagcttggcgtcgtcttctttcatcttgagcaggacgctagacgaaggaatcaagcgagactttagttcgcgcgcggccttgttgatgacgagagttttgatgacgtcctgtcacgcggatgtttgaaacgagagccggatcagttaccaccggatgatactattgttcgtagggactgcacagtgtcgactcacctggcccgtgatcttgtccttttctacgctgataaagttcatagactcgtcaaagtgcatctcaccgaattgagcttttttgatcatcttgtggttgatcttccccttgaggtccatcatgaggtgcagcatctggttgttcgaacgaccggggaagaggatcttgccggtatagagctcgtatagggtgcacccgatggaccacatgtcgatgctctcgtcgtatttcagaccaagaactatcaagggtcgctcaatgtcaggcgacatgtcattacagaaggccatcgcagcactcactgatctctggtgcacgataaaaccgagacacaaggtagggtgtaatatcggcttcactgatatcacaggcagatcccaaatcgcacaccttcaacatggccttattctcagtgacctgtcaaagtcaagcgcgtcagctatctcgttggcatcgtaccgaatccggaccgcctgatcgtggcttcttacgaggatattatctggtttcagatcgccgtggatgatgttgcactttttcgtcagcgacaaggccaagaacatctggtgggcatacgccctcactgctctcaggttcaatcccacatccttgccgaaacgcttgacaacgtctcgcaaattcatgctaaaaatgatagaaatgcggtcatctcgtctcagcgttccataattagggggcgctggcacacagcctaacagactgaccttaggttctcgaagaccagacagagatgaccacggtgctcaaaggtcctgagcatcctaacgatatgtttcttgtcgtcggggtcggccgctcccaatttctgcaagatttgggcttccttcttgccagcaacgtacctattgtccgtacctgttcttagctgattgcctccatttatcctaatgtagagacactcacatggactcctgacttcggatgaccttgatagccacctcttggccttccttttcgcctgcaccatccccagtcgtctttaaaaccgtcgccctgatcacctgcgcaaacatgcccttgcccagattgacggtgatcttgtacatcccgttgtccatgatctcaccaggcgtgatacggtagtaaccttctgcgtcatcatagttgtccatggaggcaactgcagccgggacagctttgacaggggcagaggagcccttctgtaggcaaaaacgaggtcagatgttcaaatctcgacgaatggtctgcgagtatcagcaagacaaagggcttacctgcttttttctccgaacgaccttcttctttggcgcttcttccagtgcaaacatgtcaaagtcatcgtcctcctcggcatccacctcgacctcttcgtattcgctctcctcatcctcgacgcggacgacatctggtccgggttctcctaccccgctagcgacttctttctgcttctggtgggcctttagtagagcttgctccctctcgtcatcgactttgcggtcttcgtcagggttgtaatccgccgccgagatctgttcctcgccatcgacttgcttggcggtcgtctcggcaggtaggacgtcggctccgttgccttgcccggtttggtccaaagcgtccttggcgagatcgaattcgcccttgatctcggtgacgggaggcggggttggacgcgcggattcaaggcctagacgagcggttgacgtctgaaggcctagaggagggctgtcaagtattagcatatggcaaactctgtatcacctggatgacgtacctgctgtactggtgcccgtaccgatcgaactgacaccactctggacgcccgagaacttttccaaaatctccctcctcttccggcgtctctcttccaactgctcttccaacgatttttcagggacctgctcttgctccggctcaggctcaggctcgacggcttccaaaggtggagggtcgggtttggaaatatcttgcgggacgagcacgaggtttatggattgcgcaagcgaagctgtagagtcggtacggctgtaccccggcgtcgtgagaggtatggcgtggcgggattctaagggtttctcggaccggctaaggaagaggttgcaagtaagcaacgctagaacaggcaggcggcgagcacatcctgacatacggggtactttcttgctcccgccgacgagaagagccccgctcgtgatcccgatcagaccgtccataccgctcatcccgcctgtcctcccggccatatcgcgccctgtcccgatcatcccgtctgtcatgcccaggcttgtgagaaccggtgtcgtaccggctccttgactctctcctaggctctcggtctctgtccgagtccctgtctctcgaacgatgagagccttcccggtcattgtatcgcgagctatgcgttttacgcccgggcgaatcgttcaggtactcgtctctccagctcttctgcttcttgttctgatcagagactgcatcggcaacgtcatccccataaggcagccctccctcttcagaattggccctgtttcggctcgaagacggtacagcggacctcgggtcgatctggtcacgagaacgcttgacgcctgaagatgacatgtcaaaagatcggccgtgagcgaaacgagggtgttcgagcgcttctgtcacttgagcgggaaggggtatcaaacaggtaggtttgctccaaatgagaccgagttcccgactgcgaatgtgcgtggtgtacgacgtttgatgggcaagggaggctcgatgcaggtgtatatgtggccctatcatcggttcctgggtagtctctagtaactagagtggacccaaagtggtcggtaagggctcgacttgacgcggacattataacgttttctgaagggatcaccccgatgtccgtgtcgacaatcaagtggtgatatcatcatcatcatcatcacgtccgccaagaagttcgaacacacctccatctagttaatcatatcttcagcacaacactcctgctaccaatttcgactgcttttacagcaatagcacgaatttgttatcaccgcgatgtcgaacaagccatccaattcgaaacagcctcgtgcggagcccgtcgcgcaagacgcaccgcctccttcttgtgagttgccggatcctcctttcgccacctttccttcagaccgcatctgacgtttctcgtcactttcctcttatgtctttctactttagatcaagcatcaacgtctcagccgacagctatatcccatccggcacctacccaacctcacaatgtccaccctcagccgttcattcactctagaccgtcggggaacgtcgtcatgtataattacgaaggctggacacctccacccaacgatcaggtcgccagagcaagagcgaggagaagattctttgtggcgcttgcctggggattcttgatctgggtcgttctcgggtgagttcagaccttttcgctgcttttcatacgctccgtgctgacctctagcaatgctccacagtggactgatcggaggcggagcagctgatatgtcccaaacccgaaaacatcgtcgaaacggtcgattacatacctggaccaccgatgagacatcttcggcgagtccgggcacagactcagtccagtcgtcgagcggggaagccggattaggctggttcggcatccggtagtacggatcgaactgtcaaaggatcaccatgttttgagatcctacgatgtccctgcggaccgtgtgacaacctgatcgcgcgagttgtttctgtgctcttgtagcttataatacattctggccactggctgcatgccagagtataccattcatacctatgtcgtgacaactgatgcatcggcttgcgtgactcgacagctatcccagcacgttctggtgcgctttctggatttctagggtaaccgtcttcttgccgtgtcgcaagcgttctcaacctggaacttggcctcgttggacctgtccacgggctcacgctgatcagatagttgactccatccaacgtcgatcagctaagccaaactgggggtcgagctccagggttccgtcttgctcgatgaaataccctaatacttcgacccgtcgacatgcaattgatttgatctgtccgtcggactatggcgcgccctgttcgtcactccgttgtaggtggtggggcgttcagacgaaggttcggttcgtgtctttgattcgagaaaacacccatcatccgagacgtgaaaggtgggtgtattccgaatggtagaatatgcacacggaaaaatggctgtgtggactgtgaccctgtcgctagcgtcattgtttcacgggcattattcctcgtctatggtgcatatttacaataatacctatgatgacatgcccaaacctgatagcctgaagacctggctctgcgaacaatcccatgagaccaaaaatgggcagctccaacatttctaagtcatcagcgcttgaaatccacctgcccttgtatcttggtacagcgacttgctgatatactaccgcacaagaagtgaatgacttcgttgacaacgttgaacctaggttgaaaccatctgtgcgcgcataacccgcgagtatctcaataatgttgcgtgaaagggagaagtccattgctgaaacgtttgaattataacataatggtgaggtccaatgtacagacccgagctcaaggggagctgcggtaaagcaaagaagcgtgatatggagaggtggtcctcaatggccagaatcagatctccagcatgttggccgttgtttctgcgtaaaatctaccgtcttcacctagatagcgagaaatcgacgcggaggtcagcgatgagttcgttcagcacaagcatgagttgtgaagctacacacttatttccacaaaacatcgcgaggcgggaactgtctcaccccatacagccacaactccggcgacccaataggcaccagattccgatcgcacttcaccctctatcgatctcctgcaattgccgctggaacccaaatcaggcgcacaaagcctggacgccagcagacacgcgagcgcatcgttaccgacacagaactgccatacgttccaacgagaactcggtcggagccgttcgctccgagaaggaattggcgatactctcgaagttcaccagtattgcgagaagcttgtagtggccgggcacagcaaagaagatcacaatgcaagcagataccgaggtttagtacacaaggcagttcggtctgacgcaagatctcattgacggaaacagcggcgattaaccctaaagatcgtatcccaagccgggtttgagatgattcagcgcagtcgaattgttttgcctggtgttgccccttcttgggtggacaaataaatcatactagcaccgtcaccgcccgtcttcagaatttatttgtcctctcctctcgtttcgtgacattatctatctcaggaccggaaccagcgttgactactcagtcctctttcgaggatccgttcttcagtccatttcacttcatatgcagagtcagcctagtcttacctttccaatatttgcgaccgacttgatcaacgggtcaagacgtggaaacccagagtataggagacgctcttatttacgtatgaccgggaaaaggtgccgccggtgtctctgcaagatgcaatcgatgtgcaggtcagcagttggcgtcactttccgtcaccacgatgtcctgtcctggaagtgaaacgcaaatcgaatccgcgcgtagtcatctggtatccggcaagtccgtcatggacgccggcccgcgcgttagcggaatgagttcgagctcggacagcaatgtactgatatctgaagatttttccgtcatatgaccgataagactgcagttggcgggtctctgaaggcggaattgtaagatgtcccacatttgaacctgatcattgccgagctcggacccgtatgatagggcgtcgtatacgtcgctgccgaagttgtactgtaatcagttttcgataacccgaactagatcagtacaccgaaccgtcttgcagactatctacggccgactgtcccctttgatgcgaaaatatgatatgccatgtggaacaaacacgaatgccgctgtgtcgctgacagtccgggcgcggaatgtgctaccctaaaggccgggagtgttctcgacgacctgacgacccagctggcgacctcacgccacgtctggacgggctaccaagacggcaccatcatcgcttgactcgtcctcttcctctcgctcttgctccgatggacgaccctgtccggccgactcgcccttgacggcgtcgagagccccggccatcactcctccttcgaccgctcccgtctctgcgacctcgtccttgtccaccttgcccttgcttgctggtatgtttcctgcaggggatgagacgcgtcgacggagctccccggtcccgtaccccgcagacttggacgagggttcagcctggtccttggcgagcggggccgtctcgtcatcttcgtcctcgtccgcattgacgatggacgccgaactcgaagcaggaggcggggcggaaatctccttgagggtgttgaccatgctttcccgtacgtcttgagcgagttgaccgacgtcttcgctcgagagaccttgcgtcgagacggggggtaggactgcggggggcgggttgtgtgctcgtcagatttcgtccgaccccgggctcgaaagatgtgcgcatagggaggggcgcattactcactcttgatcttcaagatacccctgttgaatatacgtttcccgtcaaacaacctgtggtagttttcgcatacgaccgggacgatcggtaccgcggctgcaagaatacccacacgcatcgagatcagtaccgcacgagaaagcacccatcgacatctcccctcggtctttctcccactctgaacgcaccctgtacggccagatggaacgctccctttttgaagggcaacatatcgttctccttgttcaagctcctcgtaccctcggggaagatccagagggagacccccttgcgtttcatgtcctccccgacgtggtgcatcatcttgacagcgtctttcgagtttttacgatcgaccatgacggctccggagagggtcactgaggtgcatatcgtttcgaggtcggggatcgaggtggaggagggcaaaaacgggaattagtcagaccaggcggtcgagagtgttaatatggcgtgcgtgtaccatctagcgagatggatggtggactcacggtattgacccaagaggggcgcccatcggagttccttcttggccatgatgacggcccgtttagggaagatcctgccgaggtagaggatatccaagaaactatcgagcccggggatagggtcgacatgtcatcagccgagctcggatgcgattggctaaccaaacccgagccgactcgactcgaaatcgacttacctctgatggttcccaaccaagaccgcgctcagagctttgccattctctcccaaggtcatgagcccgtccaagtgttccctaccctcgacctcgagtttgacaccgatcagggggtaacataggtaatagaacgatcgggcggtcaggtagttgatattgagtcgctggtgatgaatggggcagtatgagtgtatgacttttgccgggagactctggaaggggtatcgatactgacctgaccgacgagggagagggcgatactgtagacgacgcccaagatgctgcataaccccatcgtactgaaatacagcgtcaagtggaagtagtatctcgccttcttcgaccgggtggatacgaggccgaggagggagagtgccgaggccgagatgatggcgagtgggcggagtaggaaggacatggtgtagagggaagaatgttggggatggctaaggatcgaaaggggatcgtgatagcccgaagcggtgatcgcagcgagcgagtgcgagatcctgtggccgctttcactactagttcgagtgcttgacagggtaatgcagctgatgtaattgccagtgagttgattgatacataggtatccgaacatgatctgatgatgatctgatggatgatgtacccggtcaagtcgagcgagtagggcgacgcgtaagtagtttagctagttggtcgagttggtagcaataacgtaagtgacgtaagtagtttgaatatagccaagagctagtaaccgggagaatgacgtcgagagggtccattgcaacgttacaacagatatgctcaacgtccatatacacccccattgactcctaactcctggtcgactcgtatctcttactaaacaaacaaaatcagccgattaaacatggtcagtctcaaagtagtcaatcgcgacccatgagcatcaaccacccgagctcaaaccaccgcgcttctttcgcctacattctatgcttcgacccggcgatcctagtctcaatcaaccaccgtcgacctccccgtgaccgtcaaggatgccgtcaaggtgagcatatactcatatcctcccatattcacatacacctacacgtctcaccgaggtacacattacatcgtcttttgttcgataaatgatactacgcacacgaacctcctcctcgtctcaaacctctcgacgatgacactacccctcggccctcctccagaaattccgcttcaagccctcgaaatccaccaaagccctctcggtcaagatcgacaagaaatccctgtccatgatggtagacgaagagctggaaggttcgatcgaggagatcggggaggaattaccggaaaactcgccgaggtacatcgtactcagtcatccgctggtgagtacgcgatgtcatgccatcggggttggggccggggtcggaggaagggtgtactcattggatttaatcgtgtacggatagacgcataaagatggtcgagtttcatacccgctcgtcctcatcaactggtcagtcgctgtggtcgtcgtcgtcgaagtcgtgccaagccctcgctttcggcttttcacacctcgtcctgcgacgggttgactgacgtgagtttcttcttgttgctcctccaccgtcgccgacaacgatgacgacggcgacgacggatgaacagggcaccatcatcatcccctacagaactcatgatgttgcacacctcgggtctacctcaattcgcacaagtcgcagaatgttcaaaggtccgtgtacattgcctcaacccaccctctgccttatgatccccagaacccgatccagtcgatcttggtctcacctggctgacactatacaacatcacatcactccactccatctcactccatcactacccccttcgtgtgtacgtgtgtgtacgcgcgggcgaccgatgatgcctggcgctcgacgtttgacgctcgataggtcatcgagatcagggatggggcggaaggcttcacggacgagatcatcaacacaaagttgttggcctagtcgcagctcgtgcttgagtttcgagtcttcagtgcggcggcgacgtcgacgatcagcagcaggatcaggacgatcacgatccagatgcaggtaatgatgagcatatggaaaacctggtactggtgctggagaatcagacgcgcttgtcgagtgagcgtgaaaatgggcgcaggagacgattatacctcttcagatgtgcttagtagtagtcaagatgtatacccagagatttttatgctttgtcttgtcgatagtcgaaacgtcacgcggcaataacccgtgcgccccttgaagacgcatacatgatggacccgagtctcaagcagtgcccggacatgaccgatcgccttgcaaccacatcagcaggtcgtcgagtggggaaacctttacaggtgatcgaatcaatcatgccatctaacaaagctcgcaatcgaggcttgtagctggcgtccctgtgtgaatgcgggaacaatcaccaacgatctcggctcgcaatgccggtcttcccgattagcatcgacgtcacttcgctacgagtcagagagtcgggcatatcggtcaatcggtcacgaccggttcttctcaagctgaaatcgtgcggtctcgtccggtgatccgatcgaccatggcggcgggttcttcctcagtttacgtttcgcaggatcacctcggtcataacttcgtgtaatcgatctcatggactcaacctcgccctctcaaaccgagaacgttcaaccagatgctgagcggcccctgttcgcgcagacttggaccgtgttcaacccgcacatgacatgatcatcacatcacatacacccttcatcaaggatctcagagacgacaatttcgttccgctcttccatccctcgaatcgcatccggcattgctcatccaacgacccgcttaggccttgagagcgtactctacgacagagaaaggtaggaggaaaaaggatgaaaacgagctggtcagcttactatcgcatcgacccgcatcaacacccagactcactcctcttggggaagtggatgtccttcttgtgctgcttctcggtgatgaggtgggactcgtgcttggtcaatcgtcgtcggatagccctggtcttcttgtaacggaggtcgagggggaggtctggtcgaggtcgagggacgaaaccaaaattcagtcccggtgctccctatacttgtcacgatgtagacgggacgcgtgttggatcactcacacttggcgttcttgctcttgtacaactccctgacgttctgcctctgcttctggttgatgacggtcaagacacgggcgatcgactttcggacaccgttgctgaaaagagacgagaagagcaaagagccagggtcagcgctgatgttcacgcaaacgtttcctcgagcggacggtgggggagagtttcggtgcggttcggtgcggtgcgatgcgagtgtatgtgcggggtagtcgtgtcgtgtcttcacaattcaggcaaggtcgagaccccaagccgattgccttttggcttgagtagtgcgattctagcgattccttcgggcaataggtcttcccgaccgaaccggaaggacggtcaattccccttttcctggccgacaaaaatcgtcgtcgcccgttcgtccatgatcgtcaacccacacctttcctgctcggccatccggaatctctcgttaatcccagcgtcccgccttgacctagagcattgagcctgtatccatgtgtcgaccgattcctgcacccgcacctcgacccgccaattccacccgcacccgcaccgtccgccccactcgtcgccccgattcgcaatcgcattcgattctcacatctttccgagcttgttggccgatccaccggcaatcttggcgaccctcaaagaagccaactcggtcttgagttcatcgagctgggtgaggaggtcggacttgttcctggtgggtagttgtcgaggtcgaggtcgaggtgaaaacgatggcaggtggcaggtggtgacggtggggaatagttgggtaggtcgatttattcggtgagatggtggtcgagtggtcgatttattcgttgagatggtggtcgagtggtagacaagggattttcgatggacagtcacaacgcagtagaagaagaagaaaaagaagaagaaaatgtagactatcagcgttcctgttcacattcctattgaatccctaatcctccttcatctcgcttgccacgacgagataccgccatgtatctcccgctccaggcaaccatgtcccccacgagaccacctcgtgtcctctgaacgacaaacgatacgcacttgctttgcagctcgaaggcacggatcttggtggacatcttgaaaacgactagtgtgaaggaagggaaaaaagagaggttcgtatcgaagtctaagcgttccgacgtcttttggataatgtctaggcggagatgggagggttctcacactacttcttcctttttttgggtggggttgagtggttgccgaggtaaagaggaacgaaagagggaagagagggcggggtgcgggcgcaaggtcgaggtctttctgattgacgaggtcgacttgagatcctgtggaagggatgggatggttgtcgtgtgtcgagaggaaacgctggtgaggctggagccaaagggaagggggcagggggagagggaggaggaggagagtacaggttgggtgggttgcaacgaacgagtgagaagagaatctcgagtcaacctgacatttcaaccaggtttcacgattttcacaacagacgcgacattcaagctgacactttttaccatcaattcgtttcccattctgccacactgggcgagcagacggccgcccagaccgcgtcagtgatcttccgccaaatggaagcgcgcgcctcttatcgccgattcctctcttacgaccatgcccacgataactatctcgttgacaacgatcgtgaccgggatttatcaacgtcacgctcagacgttggcaacgaactgaattgcaagcctcgatcagactccaattgggaaatcgttgccacactcactcgtcagatcatatgcttctgtggccaagaagcgtcgttttcgcgcgacctgctattcatatgtttcaccctataccacggcaaacgacccgtttcacatggcatccaaacccgtatctccccgactctcccccatccctgcagtcatcatattgtcatcatcgtcattatgatcctcgctagtgatacatcccgggaccatacaaccgatcgagacgacccgcgatcagaacccgaacaacgtctccccatctttaaacccccatgcctttaaaggcggtatcgcaccatgctcgatcaatccgggcggtccgcacctaccacgtcacgtccatgtcattgtccatccgtcaacatttttgccccatacacgcgtgtcacatgatcccgtatcagtcggaaacgaaacgaccgtcagcccaccttgttcgcataacgcgctcttcccccggtcaccataaccgtaaccgtaaccgtacgactcacaaaaaggtccccaccttgttcccctcgggcgcaaagaaccgttctctgacgatcccttcatccagatgtcccgtcgtgtattcccacgctttcccaccgttgtctttgggatcggggggatggctgagcgtgaaccacggttggaactggtctggatgctgagcagtataggccttgagctcgtcgaacattaatatgtcctacacaggcgcaggttcgtttcgtatggtcagtcaatcagtgagtcaaggaccggccgggggacggcagagccagcgcagcgcgcgtcgggttcgagagcggaggacgtacggaaagaccactgttcgcgtccaccatccggatctgggtatgatcctcatcgctgttcttcaagatcgaatggatcaattgccaatgaggggtcaagcctgatggaacatggatcgggaacgccatcagctatctcacatgccagtgtccggggcgcagcgcaacgacattcgctcacctgatcccccggcgaccagatttaactgaacgcgagccggtccgacaagttcagtcgacggattcctagcgctcccgaggtggggtgactcgactactcaccttgtcaaactgatagtcttgatcattgatcctgaactttcccttgccgagataggtaatctcggaaggcccgagacggatatcaatgtcttcgcctacaagaggaaagaaggctggtcaatcagagggcattcggcagaggggagaagcgaacggcgactcgcctatctgcatgcagtcgacatagtttgatctgcaataggaaatgcgagtcggcttccagctttctgctggtgcatgacatgtttaaacctacagtgttcctccgggagggaacttggatgacgcgcttgggaaatagctcttgatgagcaggtctgttcatcgggcggggtcagctagaaggatgtcacaaagtaccttccgaagcttgactcaccgaaagtaccgtcttcttcgtcttccgtgacaggcctatgagagcgagatataaactactcttcttggatcgaacgagtcgacgacctgctcacctcgtcggcgtgtagggccgcgtcacgacaccgtcggcgcagtggaacgcaatctggacgtgattcccaatcggcaaacccatacgcccgtgcttcccatcctttgtcttgggtagctcaaaagtgtagatgctggagacatcgaaaccctctgctcagtcagcgctttactacaagggcgagtcgtcactgctgcttaccgcgtgtctttgcttatctctttgcgcttgatcaaggtagcagctgtaaagctatgtcacaaggaggaacaggccgttagccttcatggcatcctcgatcatgtgtactgatatgcacctatacggcttcaaggcgaaatctgctctctccttcttgaccttggcttgcacctttttggccctctcggcatcctccttgagcgcgttgacgcccttctcgctcagaacgccaatgaatagcttgtcccgctgctcgttcgcgtacccgtcgtgaatagcattgtagtcgttggagcaatcgaccgtggctttgcccgcgtacgtcaggatagcggcagcgccaccaggatgccatgatccaggaccggtgagagaactgacgtcgtacaccttgttatcgatgatgatccacgcatcatcgggtttgttgtgcttctcaacctcctccaacgtaaattgcttctcgtcgccagtctgcttcttggacgcttcggctctgacttgttcgacctcgctgggtttcatccatccgtcatcacctgcaccaggggcgactgggtgacggaagaacaaagagggtttgccagtgtcaggatcgttctttaattcgggtcggactcgataccacgctgaaccgaacgatgatcagccacattcgccgtgcgaggttcgctttgggaaacacatacagttgttcatcattccgagcaggttccacgtgatgtgctctggctggctgctcttcatcgaatcctgatcgtcgagaagcgatcaagtcagacacaagactgcatccccgtacctcgctcgcactcacaaatgccctgacgatgatctcggacgaattgctcaattcctgaatcgacacctcgcagtcccagaaacaccaagcccaatgtcgagtaccgtgtctcaagggcttgtccaacaatgtcctgaagcagaatttccaggttttgccaccatccagagatatttcgatcttgttgattaaattgcctccaccatggtaggcctatgatagtcgagtcagagcatgtacacggaaaatccattgggagcccgcttacatagccttcaatctgttcaaagtcgatcgtcaatatccgtatttgatcaaagggcaagacgctctggaatgcgcttaccttgatcttgcgctctaaaccttggcgcgactcttgttcaccttccaaagggatgtactgaccgtgcgccggtcgggtgatgactgattggaggcactgctccatcaagagcgtatgactatcactgtgaaagaatgccttggccatcggatctcttttcgacgtgatgaaggagggtacaacccgattatcccatcgatgactgagaaagaggttcctgagcactaatcaaccaccctagcatctttgagaacgtggcctactagtgagagtcatttggtttcttgctgatccacaccttcttcagccatttgacgcaacgacctccaacaaaagacggaatgatcgaacgcaaggggtaaccatggtccggttggagcggcgctataacgtgggtctgtcagatgtctttctcgcggccatccatgtcaaatcgaatcacctccgttgatgccataactaaaacccagggaagcggaagcacgatcagcacccaccgatggccaggcgggcgcgggtaactcacgccagcatgacatcattggtgggatccaagacgtaggcaagaggaattgacgtcgcatactttccttctgatggctcgtcggcacctgtacgagagattgaaggctatcgtatcaggataagatggacgcgggccaggagcttggcagaggctcgccttcatagctggaaggaagctgcattcagtgatcgtcaacgagcaaatctccttcgcagttcactcactttagataccatctttcatttccgggtctttccttcagattttgtttcaagagtatatccctcagcaaagccccggtccagacgcaagtggacactcccgcagcgctccatccaaatccgccactctgcttgaccatgttgacttctttccgtcggttgccatcacaagccaatgtgaccgggatctcgatggcagtaaagtttcgaacaatgtcgtccatcgagagctcgacggggtcgatgaggccgggcggatcggaaaagatttcgagggtatgggtctcccaggcgagccgcggcacggccccatgatttcgaatgtaatgaactgttccaagaagggacagttcagcgaagggcatcgatgaaagactgcgacccgttcgacttgcgcttggtgggtgtgatcaagccggcatcgaagagttccgtcatgttcggctcggcattcatgggatgtttgcctgtctgtgagcatgatcatgaccgacgcgattgatcagcatgaggaccgcgcgatttcaagagcgttcttcttactagccgtaggagatgatcagatctcgggatccatgagtctggggtgaatctgcacggcgagaagctgcttagtaatggagcgccaaagtgcagcgacatattgaaagactgactgatcgtcgagctgcactcgcatagcagcctgctcaacatgctctagctttctctcctgcctcgccgcttcgaccgctctgtctgtgccgcccgagaaggtcgagggcggttggaagtcctcctgcaaggccttcaacccgtgtttcccaaactgtgtggacggttcgccaggattgtttcccaaattctcgaaaaagtccatctcgtccatgaacctcttgaaccaacgtttctcttcctcggaaaggtcgtcgaaaccgtccccgttctcttggtcgttcgacttgtcatcatctccaggagccgacttttgatccttgtcctcgggcttggtctcggacttgggttcgtcggctttcttcttcttgtcgccggtttcctgtgcggaactcgaggactggtcgttctgtttctggtctttctgaccgggttcatctttctgctcttgtctcgccttctcatcggccttttgcttctccttggcctcctgctcggcctttcctggccagttctggttcttgatagccttctctgtggttctatatagttgtgcagctctgagtgagaaaacaaatcatgtcggaaaaggacagatactgacggcaagacataacgagccgcaccatacaactagtagacgttcaggccgtcagccaaacacgccgcttgaaaggagccccgagtttacgctcacgagtggatccactagcttccagtcctttaccaactccttgacctcccttatgctcaagcacagtttgggatcgtcataaagagcttgcaacgcttcgtccctcgttttcccgacctgttgagccgattccaataatgacctgacccgctcgacctcttgcgaatcccatgccgcgacatctttcggaagacgactcttgagtgtatccaaaacgtctttcccaacatcgtccggtcggttcaacaggtgcgcttcctgcgaatactggtcatccgagtgaacgtggtcagacctcccgtgcgtcccggctagacgaccggtatcgtccccgctgctcttcaaggggtggtgtcggcgcaaaagcgtcggagactcgttgtcgagttgttcctgagacgcataggggtagaatgatgggtctttcctgtgtatggtatgggatttcggccagacgggggtatcgaaccgggaaaagtcaggctggtccgcctgggacacggagggcatcgtggttcggaactatgttgtaaggcttagaggtacaagcgttgatgaatggaaggatgatgggcgacttgtcacagagtgagatagagcacgagtctctaggtcatccaatgagactgtatgtattcgtctgcctactgcccattcctctctcaccaccttgtgatcaacagggctcgagggtcgtgcatcgacgcaatcccttcccccgtagttattctcggttcaagccgaggggagcgatcacttcggcgacggaagcaataaacagagtagaaaacgggccaggggaaatgacgtttatggcttatggctggctggtcacgagtttggaacctgttttacaatgtcacgtgattcgattaaagtgaaacgctggggggaccgatgtcggttgctcctggaacaaacgacttgggtcttggcgatccagataagctaatcacattttgacgatgtcgccgacttgtgtgctggtcaaagatcggggcagtgagacaaggtgcactctttcgaatgtgtcaccctatcatctgagacgtgcactttggtctacccttacatttgcaactccggtgataagtaaatgaatatcatagattggaactttctcatcgagaaatagcattctctcaccacctcattcagaaccgtcttttcgccatcatgcaaaccggtcatccccttgtcaactcatcgtggtaatgtctgtcatcgaaccgacttgttcagccttcactgcaaagatctcagccccaggagagttgtccaggtgctattctggaacgacatccaggacctgatctgtaagcaagtcatctacgaatactctgagatgcaatttgtgctgagggagcgtctggctaggtatccatcggtgttccggtcgtgctacaacatgggtaggacgcgaaattgaccctcgacctgtacgtgcgaccttactcgcttcttcagctcgatgtctgccctgttcgacggtcttacatgaagggatatactcttatgatactaaactcgaaagtagcaacccgaaccccagggaccattttgcggtcataaagcgcgcttgtcagtgctactcgaacaagatggatcgatcatgaaggcgccaaaggtagcctgtgtgcatgtagtcggtgaactcggtagaattcctctggtggggcgagtattttggaagctcggggatcaagtagcgggctggggattcaagagtcgatggacccagcagtttcgcctgtagagcgccgtctcgagcgctgcgtactcgtaacgcaaggaatatgcgcgtatctataggacggaacggtagagtctgaaaggggtcagaccgtcctgatatataccatcatagatgaatgtgaacgtttcagcaatggattgcggcttcgaccttgccatctgcgctcgagcggctggcctagactccgtgaaacaggtgctcagctagcgcgaccccgatacttgcgactcaagcatactagtacagtctgccagcaggctacgatcttcgaagtcactcaaggttgatgtgcagcgagggcgagtacgagaagactcgagatcgatcatacaggggcgtatattcagcatcgcacacgcaaggcgcgatggtcgaggacgaacacactcgctcaagtccgcagttttgattagggcataacggtatgtgatgcgctgaacgtagagtgaacagacgaagaccatgaaagtgctcctatgtatttaaaccttggaacgggtttgacccaattgatttgagacgatcaagcaattcatttcgattcttcagcctgagtgaggctcgattcaagcagtgtgatccgccgccgctgccgatctcgctgctttcggttccgtcacgcgcaagtcgggcactcacttcccagctccttcctcgctgggaagctcgaagcatagcggtcagactctgagcgacatcggcagaatcgatcaaacacaaaggtatcaggtcgtcccaaacaaataagacaaaccgaggtctttgaaagaggaagccactggcgactgtcaaggatcgttgttcctgtcgatatcgacacatcacacgtcacgacttcccgaggtggcattatttaggtgctcagcttcaaggcgaatcgcaataggatacaaccgacatcacgtccgaaccacctgcctccgtcgtcgaccctttcgtggaccagagaacatacatcaaaggtcacatatacaagactgcaaatcgatcggagaagcgagcccatgtacgttgcaccgatgtcctggattggtgtctgacgagggcgactcatccttctctgtcccttcttcacaggcctcgaggattatgtcttcacctccctcgacaaatcagatagactcacatgaacatgtacaactaggagcagacgaaagtcgagccatctcgaagccagagatcgttggcgaggagcaggaggatcagagggatgccggcctcgaaagtgcagctgttgatgacgggattctagcaggcgagaatcagacggcagaagacaacgaggcatccccgagcaatcagcacgcatacagtgatgctggcgaagcagaagctcgaaatgcttctaagggcgaggctgggcaagagggcgacccagtgacaacaagcagtcgggatggtgaagaaacgcaaagggaagatgggacgaaggcagaggcgattagcgaagttgcagacgagatccagaagggcggggaaacggcggccgatgccaacgagacaggattaagaataggacagcaagatcgaagccagcaagatccttccgctggcgtccaggctgccggtacggaatccgtccgcacgacgacaggcaacccggatcacggttctcccagccaatcggagataccggcatcttccttcgtccgggtcaattcgccagctgccggctcgtcctcttccatctttagctcagctcccaagaagttcagcaccgtcaatatcaacaagaagttcttgggcaagacctcctcgagtccagtcgcgggaactccatctccgagtgcgctgggagcaaagcctacgggagcgttgggcagcctcagtaagcctttgcatcacggcccgatgctagcttatctctctgacgctaggaattatcgcagtccggccgtcaatctcacctaacccatcgtcaacttcaactcacaaactgacaagcgccaagctgacctcggtaatcagttcgaagcctggaacgggagcactttcgagcgtaccagcaattggatgggcaaaaccttcgcctagaccgtctcctggtctatctccctcgaacgaccacccaatcttgtcttcgccgggtctcgggaccgatgtgcttcggcctacaccgtcggcactaggatccctcaaacggggtcagctcaccacgccgtcattaggtttcggactgggagcagggaacaagatgaagaaggagtgggcacctatcgcttccggcgaaggatacaggtctggtctgggtcgagagtttccgacagcgggagaggttatcgagggtgagtaccgtttctgctgcgccagcccaaactggcggatctgatggacctcgccgcgtgaaataggtcaacggcaggcacaatctcaggctcagtccatagctcaggctcgagctgcccacaatgctgccctgatagaaggtctcgattcgttccgcggcgtcaaccgcgacccgaagatgcattattgggacgaggtgggtgcagtatcctttgacgattcgtgagaacgatactgatcctctactcttttcgcttcaggacgacgatgagaatgctgttgacgacgtcattgactttggagatggaacaacctataccattgcagccatggccaatccgccaccgactcaagctcaagaactggatcagatcccagaagtacctgtcagcaaagaggagcgctttgcagaggacttcgacaggagttggccgccacgaggtccgcctgctatgagcgggcagtcttcgagggctttgtacaacgatcgatccaacaggttcgaggcacatgcggaaaacgctcctaatcaacccccacccaggccgcaacagattcttagccgtggaggaggccggggtagcttcgatcgtccggctcatggagcagaggttgactctcagcgggggccggcgatgcactcaagagaagggtcacgaccattaccgcctcatctcgctgggagggaaccagacagactgccgtcaaccagagacagcgaaagaatgtctttgaatgcttcaaacggcttaagatcttcgctacacgacttgccacctcatcttagagatgcgcatgcgcgagcaccacagcaacaacacgccccgattacctccaggccagatcgacatttccctccacaccatgagcagatagctgacttcgatcgggctccacgaccggatcgttggtccacacgggaaaaggagaatgtatccaatgtcgaggtcatgacgccggactctggaaggccccgtgcacccgtgtcgatcccgacagcgcaaactgtaggcctggatcaaacctccgccactgctcagatctcgccggttatctcgcccaaagttcccacgtcggttcctgcaccagcagatgtcccgcctgtctcccagggcgatgtcaccattgaccagaaagatgagatgcacgaggctgcagaacgcgcccggctgcggcggcaacaggaagaatctgagcgagaggctagggcagagagagctcgacagaaagctaaacagctcgaggacaagatgaaagaaatggcagctgcgaaggcagctattgcaccagcacccgtcgtttcgcccaccatctccaagattctgccacgtcccgccgattcagcagcgcggccagtcgcaccttcccaaacccctgcaacagcagcgctgcatccagcttcttcgagagactcgggaatccggtccggtcaaatggcgggaccggactcacggcgggctgagccaaccgaattgtggagacggcctgctcaacagcggacgagcttcagtggtacaacggatataccgaaaccttcatctgcccagcggcctcaggtgatatcgagccagggttcgaccgacactcaggcggttacccaacgagcagatactgctcgtctgacccgtgacctaccaccgcaggcgatcctgccaaacgacgtccttgattctatgcctagcgagtctccagtggcggtttatttcgctgacttcagcaagcccgacggccctctcagccctgctcaagctctcactaacgttgccccgatcgcggacgcagatgccgaaggatctcgcttcgggaaaaggctgaacgatgccggaacttggcgaaaaccgacagcaacggtcgctccaccccgcggcagtccggaaattgggttgcagtcaacgaaacaggcagaggaacgatcccacggcgcggcaatacatcagcaagcgattcaaaactcggttgattctgcgcaaacacaagacggttcaactgtgcacgaaaagccaagaagatcatctcgaccagccgaaagtgataacaacttcgatcagatcatggcgcgcataaagtcagcaattgttgcggaaaattcagcagcgacacatgctcgagatgtgccgaccggcaagcttccagatgcaacccatgacaacatctcaaccgagccgacgcagatagaaacggcaaggccaatgggctcagtccaaataaatgagagcgccgccaaacagcataacgcgcgctcgcctgtccgatatatccccttgcctcaacctgaagatttcagcgtaacaacagccgccttgccttccgacccgcccccagcatggaaaactttcgttactaggctgccgaagtcaagaaaggcacaaaaacctcttccccgcagacggacaaggtcagaccacatgtctcctatacctcgaggatgggcattgtcctggaacccaccttttgagcaattgaatccgaacacgctttcaagggacgaatggcttatccccgcaacttatgtgagaggcaaagcagtcgcgcctgtgagcttgcccaagcgtgcattcggacgcttcgtaccatccgcagcatccaatgctgctgtagcgcgttcggacatgcggcaagcgaaatcagaccgcccggctgcagcggagtcttctcaaacggtctcggtcgaggaagcaaaggtccaagataccatctcccggaaaatcgttgtcaacttgccccgtcggtcgttagcaaatgcaaacgctcgtacaagcacaacgatagcgccccaagtctcgaatctgtccaagccgatacaagactatccttccatagagccaattgaagcggcacagaccaccgaggatttggactcgcttttggcttctccgtcaccatcggaaacccctctgccgacgtctggtagccgagatcgaaatgcagcgagacagacccccaatcgtcgtctaccagacggaactggtgtggtctttgcgcgacctcacggtggctcgttctccgaagaggccgaggccaagtcttcaatgcgtttcatggtctccagcgagctcgaaatcgacaatttgctagaggaagtgaacaacatgagcatggacgggttgacagagactgtacctgacgcttccggtgtcgtggtcagacagcaggaagaacccgtaagtatctgcccttttcttctcagctcctctcacatgggctgacggtccatccggtcggtctttcagtcgactcaccggaaacagcaaaccgatcggagtcgtgcaacatcccccaatactgcagctagtgtcgcatgggcaaaatcgatgccctatcctacaatccaggccaatcaggggctgtccaatcgggaccatatcaagaacgtctggtcgcagagtggcaatgatcatctccagcaacagagcggcaattccctcatggggatcgccgacgatttgccgccttcgctgtccgtttcaatgcaagacttgaaggaggagacagacaaacaagctcgccgccaaaaccagctggatactgaaagtcctcgcttcgcgacgatcggagcggttaggtccgactcgtctgacagaatgcaatacagtcgtttgcaacaaaacgccactggcgaatcagactcgaccgacgctcacacgtatggctctgtttcacaaatgccgaacggcaacaattacggttacgctttgggcaatgacacgccttctccgaatttgcctcatgcgggacatggccgttcgtcgctctccagtcataaccctcctacaaactcttccaatgttggtggtctgccaggtcaacaccgaggtcagctcggcgtctgggttccattgaaccaagctgggatgtcctccaatgctggcatgaccacagcaatgaatggctacatgggcatgccggtttctcccgtttatggctccgccgctcctatgcagaaaggaaatggtaagaagaagcgcctgctttcagattttggtgttgtcactgatgcgtatcattacaggccgttcctcgtcgcacaacgggtatctcggaaatatgcagtctagcggagggatgtactctcatcccactggtccccttgattcgccttccatgtcttacatgcggccaaatctcaccacaaacaatgcatatcagacaacgggcccgcagccggcctaccctgcctcttcccaatcctactcgatgcgggacggatacgcaaactacggtttggctgctagcggtatgcgcccgcatggatctacatctgctgggccggggcattctcgttatgccagcatgggatctccacgaaacggtgggcttaacaactacgggccagctagctataatgatcaagctgctcgaggcgtaggcatgcacgcagggtaccatggaatgaacggcatggtagggtctggatctgtctcgcgagcaacgggaagcagtcaagcgggcgggaggctgagcagcagtgggatgagtgccaatggcacggtgaagcggccgtggtagaatcacaggaaacttgtcattgcgaatgcataatgttcatcacgctactagcggctattacgcaaccatcgaatcaggcagatcggacggattcaccactcaaaagcagaccacattactcaaccagttatcggcaacaactgaccgataacagcgcaaggctgaaagcgaagtcccgtttagctagacgtcagacatcggttatgagagggactaaccaggtcaaagacatcccgtctgatcgtgaacgacgccgcacatctgatttccttggctgttgccgcgatgttactctgctcgctgccattctgcaggacgacctgcatgtagaagttctgagcagtgttctcaaaggcatgttggctgaacttggcgaaatagtcgacggtactgtgccagcgcgctgagcatcagtttaccatctacgtgatccgaacaaaacgcctaactgtactcacgaagatcgatcaaggagctcgtaaatgaatttccccttgttgccgttggtgcctagcaaatcggcgcggttccaaccagcaagtctagcgaattcgtcccccacaacgcaaatttctccggtccttcgccatacagcggtcggtgtgccgctgtacgagatcaacttttccagttcctgtagatcacagtgtacatcaacacggatgtcggggcacaaaacaggtctgctgtacttacaatcagggtacgttgaaaactcttttccaagaagacttcatcttcgaaggacaagggcattctgtagagtcgataatcagtcagtttagggctcatgctaggccatgccatgggatgcttactgcagtgcaattaagctcggtcggaaggcggccagactcttgacgacccggagtatgctcttctggtcaaagtttctggccaagaatcgcatgagctggtgatagctgacggtgtagtcactgtgatagcacgattatcagcctgaagagacaagctggcagatcgactgcactgccgactcactagggctcagagaccaagtcatacacagagctagccgaagcttgcgtggcgatagatcctatacccatcgtccccatgcccgtcgaaggcccaggggcattgtcttggacttgatcaggttgaggcgggatcatcgatggaagactgttcgatgcggcaccgttatcgactgcaaagtccatcatgtcgctgtcgagggttgcctggctggtgacattgccgccgatcatcgactgcgatcccattgcggcgccctgccaagcgttcatgaaggattccacgccgttttgttccgctagaccgggtagatcggcaaagatcgagtcgagaacggcatactcgaggtttgcggcttgcgagtcgaattctatcgaattgaaggcggctttagcaatcagtccggactggcagacgaggtaaagcgtaaagcggctcacgaaacccttgttcgaaagacaattcattgccaaagttgggatccctcaactcctggttgttcgactcgtcttgttgaagcgtcacatcgccacccgccatgatgtcatcctcctgatcagggagtttcctgacaatggtcaagggcgtgctctctccggtggactttcggatgatctttttcgactcctccgtggccgagtccaccggtagtttcctcgcccgggagcgtttcttggcattatgctcggctacaccagtagtgagtgggcgatcagcgaacaagtccagctcggctggggctggcacaacgcctcacctaattccagctccgtcatcaagtacttggcctttttcctctgtccttcacagcattgatcgccttggcccttcttgacacatcgggtacaaggtcgagctatgataaagctcgcgcgtaagcactcatcagagaagccgaacgatagcatgtatactcacagtcgtcgcaagtcaggtgggctcgttgacactgcagacaagctgagccatgataccgatcagctatcacttcgagtcgcgtcacaggccaagaggcccgatcaactactaacctttcgcagcctttttcttgaccgccttgcccgcagaggcggccccgctgccgtcaccaccaccgccgttttcaactccagtcgttgtcgaaccggccgtctttgccgcacttatagcggggaacggcggctctgccgcaagacccgcttgaatcgacgcaacatcctgacctcccgatccgcctcccgactctcccccgcccgaccctgacccacccgcggattgtcgtcctccgagactcatctgaaccggaccgcccatcgacccgtccgctaggccgctcatactgtagccggagggggagacgttcgggtcctgtccaaccgggctcgtgaccccctgtcccggcctggcatacgggctagacccgtccgtcctagtttcaggcgactcgttactctgttccgaacccgaggggtgccagttgttatacgaacgacgttcgaaaagaccttgagaatgaggttgcgattgaactcgagattgagattgaggtcgaggcggaggcgcgtagaccgggacggaactcgtcgtgcttggggtgctcgcagcgtattcctcgtaatactgtccaccaggtccaggtcgagccccgaccgaggtgttcaaactaccggacacagccggggcagattgataagaaggtgtatgcgccgtgagcggtcgttgatactctggctgctggaccgtgggcatagtaagcgccataggctgcatatcgaacgatctcgtcgcagaggcttgataatcgccggcttgagttccagagaaatgcgagggtggagagtattgataatacccggcagggggctgttggacctggtactgcatcctaggcgggccggaactcctctgttcgactgaatacgactccgactcgaacttggattgatgggtctgcatttgcaccggcagcaaaggtccagctgaacgtcccaaaggttgtgtctgttgttgtcgaagtccatgccaactctcaaacggggacacccaacccgtcggcttttccttgacccgcaacgacccagcgactgatcttccacttcccatatcttcttccgagctccttccgacttggtcgtcataccggtacgaagcgtgcccacgaggatcgtagtacggtcgttcacaccggaggaccgtcctattcgccaattgggggttcatgcattggtccacaccgtattcgggcaaggtgtggttcttccgaaaaggcatctcgggtccagaccacaggtcgtcctggccgtgacgtgaaagaaaggctgagtgggtggatgattccacctcggggtgctggtaaaggtataccggacgacgaggaggtcttgcaggatggatcaagatccgagaaggtgacagtagtcttcctggtgattcgttccggattcgccgtcggcggtcactcggatcgggtccgcgatcggtactcggataagcgtatcgagtgaagaagctgcgccgtcgatctctcgtcttgttcgttctcgaggagacggttgatgacgagctcgggaatgatgagagtgtggcgtgattgttcggcggtgatacggtcggagatggtatcgtgatggtggatgacacgggcggtggagacgaaccgtcaatgtctcctcgcactttggcggatgatgaaacgggatatcaatcgggtcccaccgacgtggtacaaagtcgatcgaaagtcaggatacgatggatagtcagtgagctggttcaagtagaagataatcgttctattcggctcaccccggggatgatggtgatcgtccgtgagtggcatattgagcaggacgacggacaacgggccgaagaacagattatgcgggacggtgtcgatccttcgtccttccgccgacgagtgagacggtgcacagagaggtacagcctgtgtgcgtgtgtgcgtgcgtccttgcttgcttgctgccgctgctgctgctgctgctcctcctcctccttgtgttcctgctgttcctcctgcttttagcttgtggatgtatgtctcgaacgatccgacgaggtcacaaatacaaatccttccaagtcgagtacaaataccgaacgaccgtgtcctcttggaatttgtattaactcgctcgagtgacggtcccgaacgggatcggatgcaaatcccagccctgccctaccccgctgtgctactcatgttttgcttccggttatccacccaacgacgttcctcgaattcgtcatttccctagtcagtcgtttggtgagctactcatctcccaaacttgcaagcagcaagcagtcggtcctttcactcgatcgtgctcaaatcattaagagtctatcgaactgaacgagttgtcaaccagcatcctagcaggttgttgttgcctcgtccatgaacctgacgccaacggtcgtcgtaccaacactttgcgcaaacacgcgctaagcgccagcggatagatacggcgcgccctctcgatcccctctctcagctgcatgctgcttgtcactcaacgacgagataatacatgtcaacgtcttccagaatagaagcacgaggggcttttcttgtgtagagtggccatcgtggtaacacgatggaacgaggatggatgcagcccgatagctgcaacgaacagatctctgtgacgagctaagacatggtgaggcaagttcaagacgtccaacttggcattcctctgcatacccaggacgaccctacacactatcgaccttggaagcgctggctttgtgaaaaaggttgcgataagcttcccagtttgattcactcgctgacagtcccgaggcggtgtcggacatgacagacgatttcttgtcattggttgtttacagatcttcctgtcctgtttacgagatcaatctgattttgcacgtcggtctctgtccttctcaaaacatgggatgatgcgggcgttcgcacacgacaaaggcgaggtgattgggtctgactgccgattgatggggtcaagctgaatgatgatccgagcagtggatagcggcatcgcggtagagtggggctctttccctgtcatcgatagcgggcaagacaagggccacctgagttcaattagggggacatcgcagaatgtgcacccgttagcgaaagactcgtgtgaagataggtagatatgtacaaccacgcatgtaatcaagcggtccagcgggtgaacgcgtcccgcagaacagaaaaagctggacgaccttgtatttctgacctttgttcagccaaatatagcgaaagggtatcattattatatcactcgacaaatcaggatcatagacgactgcggatgaaagcataagaatgaccatcaaggcaaagtccgagcggaagctcgcgcgagagtcgaccgggaagtggtggtcccgctgcgctctacccccgaaacagccaaatcgatggtggtcgtagtcatggtcgaccgaactctcgacgtaagcccaccggtagttccttgtctagacttggagtcctgtccagcacctgcagccggacgacggacggttcgttccaagcccaagcccaaggcggagggctgcgtcattcgagttcgggaagaaacgcctgcagcagtcgtagtcgcgctggtgccggtacgaccggcaatgatggaggcggcggtcgtcgaagcgcgttgcccggatgaggcggtcgttgacgagacccgagccctgctgacgagattactagtggtgttagctcgactggcgggcgcggcgacacgggtcgttcgggatgtcgggtcgcggatccccatagaggccaatacttgatcggctctggtcccattactacgagttcgcgattgacccaaagtcggattggcgacggtcgatttggacggctcggaaggccgtgtcgcagcttttgctggagacgtcttggtagccgcagcaggtgctcgcgtgatgttgccataacctgtggagacgtacagtgagcgcgatccctccgtgtcggcagctcgagtcgatgacttacgggaaataccactgcccatagtgccaggtctagacgcctcgctcgaagtcctgctgggaactcggttccttaaatgttgcgctgacacggaggggaggactgccgtaactctcgaggtaagcgatggcagatagaataagtctgaacacaaacgcctcaccttgcgacggatccatcgtcacgtttcgtcgatgaccgattgttctgccagcatcttgcccagccgagggcatacgagatctggctccgccgactaccacgccagtctgaacggggtccatactcgccgatcggcgatgcgcacgcacggtcgtctgagccggatgcagccgtctagcgtccttcacaaagaccggagtcgcgggacatcgcacggccggacccgcttctacgggtgtttcatcgtatatactgacggtggcaagacgtcagccggctgtaggtcatcctctcaaagttcggcgccaaactcacatcttcaataccttcgtcagctgttcgccctgtatgagcccttccgcctgcatctttctcgcccatgccatgttgtccatcacaaatgtccatctcttggcatcctcccatgccttcaacttggcgcctctcgaatcgtccgctttggcttgctggtcgacgcacttgaggccgtcgttggagagggaaggatccaactggaataccaatcttgaaggctgggtcgtgttggtcaaccgggccagctcgcgctccacctcgttcggttcgggtgcaaccttggtcgggctaccaggcgacgcgccggtaaagatgttgcgcagtgattgcccaggcggtcgggacggtccggcttgggtagtcggcttgtgaaacaaggtcgagtgtccatcggctctgcaagtcggcaatggctgcggcaatcagcttgacgctcgtcgaagatctctgggttccgtctgtaaactcgcctgattctccttgaagccctttcttgctcttcgggagtggcgatgaacgggttgtcctctttcaacaattcactgacactcatgtcacccctccactcgggtttcccgtcttttccgactccgtacatgtctttgggcagaatggacgtgcgttggagcatcgtcttgaggtccagggtttcatacccgatcgccacgtcacttgacggcgggaccaagagggtggtctgatgggaagtgttagccgtcgatcgattcgcgattgacgattttgctggtgaccgctgagcaatcgatgtctcgggtctcggcgtaggtacctctttgacgggtgacatccccttgacctgtctgctcgtcctggcgacaggtaacgtttccatcctggtctcgtcgccgatcatcgtcatgtctaccattcgcaacgcctctctcatctcgttaccttcgttcatcaagtctgaacccaagattgacgcggacccgacccatcccaattccaagctcgtctcctctgtcaggacgatgggcggggctttctcctcttcgcgaacgagcaggatagagtcgtcccccaagttcattggcgtgcgcgtcaagaggcagctctcttccaacatccaagcgtccctcctgatccctggcgtgtcgggtagaaaggtcgacttgtcccctacacccagaccgacgggcgaatctggactgacaggttggtcgacgtggtgatacctcttgggcgactggccggtcggacgggggctgttgaagaacgtgcctttccgcttcttcccgctcctgcccaccgtgtccatgttatcctgctcgctggaatgagaagaggccgaggtggacctgttcttgaccggggtcgagccgtcaacgagaggacgatcgcttggcctcgtggcggtctcgaagctggcacgttgcgcgagcgatgcgcttgagaggatatcccgagcaaggtgaccggcgtcgtctttgacgggagatcgaacccctgagctcagcatcattgtctctccagcctctctttccgggctagatgcaacttgtccagctgatcctgaagggtatctccgggtcgtcggaggttcgatctggatgacgggcgcggtcgatgacgtccatggctcgtccatcatatcgacgggttcttggtctagcagaccggtggcagtggagacatcctcttcgtctctagtgggtatcgtcatcgcgatcgatttttccggatcaccatgatttcgctttgatggacctgaaacgcggtaccgccttgagcaacaggacgacgatgggcgatcacgctcaaactcactcgaccgtacgacttcctcttgcacaccatcaacctgcacgtcgagtgcggcggtatcgataggaagagaccttctctcctgtatcctccatgggccggacgtctgtctctcgtccgcgtgtccatccgcagcaagaccgacctggggattcaaccaggagccacagatttccttcttttgctcgatctcgatctcggtctcggtctcgtcaccagtcccgttcccctcgtcctccttgttcccattcccgcctcccaacggcaccctcacgctaaccccggacacacctctgactaacgtccccaaatcgacccgggcagacaaagaccccgatccgggcgtccttacgtctatgtgcattggggtgtctgtggttgtggtttccctgggatcaggggtcgggtctacacctgcacctgcacctgtatgggcgctggggttggcatcggcattgccgtgggggttggaatcaacattgacgttggcattgacatggacattggcgttcaagttgacgttgtgatggacgtctcccggagaatctcctcgtcgagcgggtccttgcgagtctcgctcttgcggctcggccgaggaagaagggtcgactagggttgactggtctttctcggcttccattaatttcggggccgaggacgacgacgacgacgatgaggcaacagtgtcggggtgtgtacggggatcatctttgatcaggctggacaggttgtgaagactctgactctgactctgactatgagcgaaggtatgactgtgaatgcgctcaaagttgtgtttatggatccgtgcggctagaaagggggagagtggcagagggatgaggtctggcctggttgtcgtggtcgtcgtcattgagggcggtggtggtggtgatgatggtggtggtgattcgtccatggtggatccgtcgagctccgcttgaggggggacgctcgaggtaatatgggtgagaggtcgacggtgttttggataggtgtcgctggtattcgatgcgcctatagagtcgagtcgataggcggcaagtgatgatgatggtgttgatggtccactcctgtgtggaaaggttgattcaacttctactcgtcgtccatcatcatcatatcaacaaaaacaacgatggcatggagggatgatcacgcgtttacggcatcatcatgtgataattctcggcatcccctcaccagataacctgacatttagcgattcgcaactttcgcaactagcgttgtgatcgagccagcggcagttgtactctctgagccgagcggatcattgtacctgacacctttcttctctatcctgcctgcccttgctcctggctgtttccctcctgatctcctgatttgtttcccccaaagcaacgcgcgggacgggggagggagggagacgcgcgggaaggacgatgcggataatcgacatccaccaccatggaccgcacacccagacaaagatattcatattctccacttgaacacattcctcatcatcatcatcaccaacaccccgccctcccttctctcgtctgtctcctctaaacacagattgaacccataaaaacacgaatagagacacccaggatgaccgctcgactccctctcacccgactcgccacctcggcactcccccgtcgaacgctcaccaccaccaccaccagcagcaccacctcgtccgccctcgcccgattgacaggaaagaacgcactcctcgcgaccccgctcgccagggtacacaggtcgggatcgaatgccagccggttgggactcgtaggttcggctcaggcgggtcaggggaagaggtgggcgtccgccgaggctcagagtggggagggccagacgatggtcagttcacaagtcttgcgcggggtgtcgagatggatagcaggctgatcgtcgtgtttcgcttcttcttcttctactttttcttcctcctcttcttcttcttctttctgatccgttctatcataccatatgctgtcaccaccatcgccatcgccatcgccatcaccatcaccatcaccatcaccaccctcatcaccaccaccaccatcatcacccctacatcccttttcatcctcctcctcctcctgtcttaatcgccatccttctcacggtactcttcaccccgatcacccgacgaaatacggccccatccccgtcctcatcatcacccaatcgtaatcgaatcggtaccgatactcgtcgaaaccgtccgatctggatttcatacgttctttgatattcgattcaatttcgatctcgctgggcgcggtcatcggatcggattggatcgggataaacgcctgacctgaactggactggaccgcaccggactggatggacatcacgatgcggataccgatcgatcgacttgcggggaatcgcctgacgacttttgatctctgatcttgcatctttgatctttgatctctgatcttggactcgggatcatcgcctcgtctcgcctcgcatcgcattggggatcggatggacatcttcctgactgtgcggcatatccgaacacgatcataccgtcctctttggtgatgcgatgcgatacgacacgatgcatctacgatcgtgttggttggattggaatctggtcgaccctggcgtcactggatgttcgtcaccctggatcgaccgatcgatatacctcgatcgcacctctcgtcgcctcgttcctctcgctttcgaccatggctcgctggtcctccttgcagaccgtccgagacgccctcaactcggccatggccgaagagatggacagggacaagagcgtctttgtcatcggtgaagaggtcgccaggtacaacggagcttacaaggtcaccaaggggttgttggaccgattcggcgaggacagggtcattgatgtgagtacggaccgtgcagcgatgtgatgcgagcgaggtgccgacggaccgttggcaccgatcatcaagaccggaggagctgacgctcgacttgctggaccatcttccacgtgtagacccccatcaccgagtctggattcaccggtctcgccgtcggagccgcgcttgccggattgaggcccgtttgcgagtttagtgagttcatgtctggcgtcgacgacctgatcgaagggaatcaaagacggagattctgacattcgcacgacctcgctccgcagtgacctggaactttgccatgcaggccattgaccagatcatcaactctggtggaaagacctattacatgtctggtggaaacgtcccctgccccgtcgtcttccgaggtcccaacggtgccgccgccggtgtcggtgctcagcactcgcaggatttcgccgcttggtacggatccatccccggtctcaaggtcatcagcccctggagcgctgccgactgccgaggattgctcaaggccgccatcagggatcccaaccccgtctgtttcctcgagaacgagctgttgtacggagtctcgttccctatgacccaggaggagatgagcgaggactttttgctccccatcggcaaggccaaggtggaaaaggagggaaccgacctcaccatcgtcgcccactccaagatggtcactcactcgctcgaggccgccgagatcctcgaaaaggaggagggcatcaaggtcgaggtcgtcaacctcaggtcgatcaggccccttgatatcgagaccatcatgacctcggtcaagaagaccggtcacctcgtcaccgtcgagggtggattccccggtaagtccgccggcggaggtggggcgctgtcggtgtgcgcttaaaaagactaaaactcgtactcctctactcgtctattcgtcagctttcggagtcggttccgagatcatcgcccagatctgtgaatcttcggcgttcgactacctcgacgctcctcctgagcgaatcaccggtgccgacgtgcccactcccgtgagtctcccccccgccagacatggcgatgtggaccctagctaggagactgatcgatcgttgtccccatcgacgtacagtacgccgagtcgctcgagggtctggctttccccgacacccctctcatcgtcaagaccctcaagcgtcacctttgtgagcaaaattcctctcgcaagcctgagaagacgtgggatcccaccgtgctgattcgaccttgcacgacgtttgtagacaggcaatagatcgtcaattccatagggacgcgtgtgccgtgacctggcgtctcgtctgtagaacgacaaaacaaaatcgcaaacgatcgacctcgtaccgggggcgttctctacatagatgaaggacgagacgttttagggatgtcgcggtgagacgactgaaagtcgtttgggatgatcatgtttggcttgtgtgtgtgtgtgtgtctgcgtgtgtgtggctgtggctgttgggatgtttgggcatgtacttggatgggaatcttctcatctctctttttcattttacgaatggatggatggtcgatcgtcgagcgaggtcccttgtctgttttttagctttctcacgcgcgcgtgtcttatgaatcgctagccagagagggaagccctgggtggtcgagttggtacgtagaatgtcaatcggcacacacgaacagatgatcagagacgatggggaatgtggtcataccagctcgacaccccgatctcacatccaaagatactcgactcgacgactctactcgctactcgaaacggatcactcatcctcttacgaaacatcccctcgagatttgccgccctggtagatctggaaagaacgaagacaacgagcaaagagaaacgaatctctcttcatcaccgactcccgacccggacccccatctcatccattttgacaactcatcatcagtaactagagaccacaacactccaagcatacgcaattcgaaaatgtccgtcaaaccttcttccaatcaaccccaggcgtcagcctcggggtccgctcctatcgacgcttctcatccgatgtcgaccgtcatcaacggcgggacggggaggatcctctgcgtctctgatatcaggggagattacaacaacctgaacaggatggtcgaagagaccaaggccgtcgcggtcatccatacgggagatttcgggttcttggacggggaaagcccgtcgaggatgttgccgaggtgagtcgagctcgtcagtcggcatgtcatgtcatgtcgtctgaggtccagccgcctcgtcacccgaagtcgactcgaaacgcgatcgcaaacgagctaaacgacttccacccctcgtcgctcttcaggatctctcgacacctcctctcctacacccctcttctcgataacacgacccgatccgagctcctcgccatccctcacggcccagacctcttctcccggctagaccccgaaccttcctctcccagctcgttcaaactctctcaactcggtctcctcttgtcaggggagatcaaactcgcctgccccgtctacaccgtgtacggtccggtcgaggacgtcagggtgttggaaaagttcaggacgggggaatacgaggtggacaacctgatgatcctcgacgaggcgttgacgaggtcattggaagtaggggggatcaagttgagattgttcggactcggaggaggcgtgcagatgcacaggatctgtgagtgtcccgttcggttcggttcggttcgggtctcgggcgaggtcgatcgaagaggcgtgctgatcggatgagaggtacagtcgacaatggcgaagggacggcgaccatcgctggtggaaatgggacgatctgggcaacagcgcttcaaatcggggaactcgtggataccgccgagagggtacgcacatcgatcgatcgtctttcccccgtgtcgacgtgttcagctcacgagtgatgacgaaccgtgtcgtccctttaggtgtttgatcctagtgagaccaggttgttggtcacccacggcgcgtacggcaaggacgggcttctcgctcaactggccatggtgttgaaggccgacctgaccatctcgggcgctcttcactgtgcgtcacgtcctcgtccccgagtacatgaccgaagtcacaatgactgataatctctctgtctctcctcgcccttcattttcccagtccgattcatcagctcgttcaacgagtttggcgtgcatagcgatcaagagagtttcaggaacaagctgctcaagagcaagaacgcgttcatggacgtttacgaatccgccaaggttcagctcgatagctcaatctcgtgagtctcggtcgtcatcaaaagccggatgacccctgtacgaggtggaccgacgatggctgatgagagttccgtcttcttttttcgggacgaccagggccgaccagaaagaattcctacaaaaggccgttcaggtcgcgcaaaaggtgccgggcgggaaagcagatgaggaggacccgtactggaagaactgttggcactggagcctgtcgtaagtcgtcaacgtccatggctcacaattgatctagtcagctgatacgatttggatgccctcgttgtcagcgaggcggcttttggccacatggtgttgtcggtcaaggaagggagggtctcgtccgagacctttagtcaaggtgaggtttcgcacgggtccatgctcatcgaagcgcgactgatcggtatatcgcttcaggcctgaactttggctacagacggtaccaaaaggctggtcgacaggtcgaagctcctgcccaaacccagacgaacacggggacaaacacccctgtacagatgaacgctcaaaacaaatctgtcaacgctcctatgggtcctgccagtcagacccgtcaacccgctcaaccccgcaaggtaaacagtgggaacactgttgagaacaagcccgctcctgctcaaacgagctcgacgcccggtcccaccaaaccttcaaccccggcccccgcaccgacagtcaacccgcctcccaacgtcgcacctgctcaaaccaagccgactcctacggtccaggccaagcaggctgaaggtccgatcccgtcgagcacgagctcggcacctattcctcagcagtcacagcagcagcagcagcagcagcagcagtcgagtcaacagcagaacggacgacaagagcgcaagacgtcgaaccgtttcgagaaaggcgaagtcaaggatcgtgagcaacgggagcgcggtcccgagcgagagcgtgagaacccttggaccaaggcgaacggcggggaagctaccgaacgtccgggcaagaagcttcgcggtcccaagcccatgaaggacaccaaggagactaccggctcgtcgacggatgggttcaaacctgtcaacgcgaaaaaagagctcgccatcaagtccgagacgacaagcaagccggacagtgacaaggagaacgcagccgagtcgaccgagcctgccgaggatgctaaaaagcccgaagctgaagacgggccttccaggatcaacggtgaccgacctccaaggacccctttgaacccttataccttgtacatcaagggtctgcctgcggatgtcactcaggacagcctcaagaccatctttgacgaggcgatccgtgccaaggtgagattgaacgtgttttgtagtcgttcaaatcttcaaggggctgatggattcactgcacatgcgcctgacagatcacccgcatgaagatccctctcgaccccgctggcaaggcaaagcgctttgcctatgtcgagttcagcaacgacgaggaccttcaagccgctttgaacaagcacgaggatgtaagatttggctcgcatcgtgtgccagaatttacactgtctcatcgctgacgctggtcgtccgccctctctaggccctgaacggatcgtccttgaacatcaccatctcgaaccctcctgcgactagctctttccggggcggacgtggcggattcaacgggtctcgaggcggacgtgggggtgggtttgggggacgaggcgggttccgaccagggttcaacaaatcggccgctccttcgtcctaatgacgagactcaggtgcgaccatgacctcggttggccccctctgaacccgacccgatcctctgcttctacgcttctatttcggtaaactcggtgatccggttcattctctctctctctctttcggaacggtcttttcttctccatagttatgttgttttatgctgctcgtgtgacgaccttgcatcgcgcaatacgacctccctccctgccttcctcgcctctcccaccatcctatcctatctacaccctctcggaactctttcccctctccttctctccccgatttacgcccccctcgcttctcggtttgtagcatagcttagtatttgggaatatcaaccacgtgcatgtctttctcaacgtcgtgtgggtcggcaaacgggccttgtctcgtgagaggccattgggcactggcccgattcagagatcacagcgagtcgatcgataacatgatggtcgatgtcgagggttgattcggaaccttttttcctgatttcggaatcaaacctccactttatctttcagattcaagggcatcaacgagcgggaatttctcaagtgatataggtcgccatgatcgaattgttggatcaagttcataaaaacctaaactcggtgctctcctatagctagaatccagaggccgaatcacttggcaatgtccgaaccgaccatcgatgcgatcgctgagccggcagctccggtaacaaagcccaagaggcgattcgtcggagcttccaatcgaccgagcgcctcgagaggtaaagccgcccctcctcgacgggtcaaccagattcccgacgagatcttgcacgacaaagccttgaacgaagctattaccggcaagtcgatacaacctgaggccgcgagtataccagtctgacctccctgcatcgcagatctacccgccaactactcgttcgagattcacaagaccgtctacgcgctcaggaaagacaaggtccaatgcgtcgccctccagatgcccgaaggtttgatgatctacggacctatcattgccgacatcctggaggaacatacgtacccagccacacccgacgggagatggaaggggatgacgctcgaacctctactactagcggacgtgacgtacggagcgtgctgcatcgacgatttcacggctaaagagatgggcgccgagatgatcgtgcactacggtcatagctgtttgagtgagtccacgaggagagggggcccgcgaaagtctttggatctaacggcttcgacgcggtacaagtccccgtatcgcagaccactctgaaaacgctctatatattcgtcgagatcgccatcgacccgctacatctctccctcagcgtccgcaggaatttcccatcggatcgcacggcttttcaacgtaccatcctcgaacgacagttcactgaagttgtcagccagagtaacgtcgacaagggcaagggtaggatcgagattgggatcgagggggaggaatcgtgggacgctgtgcccgtcgtgcacaagaccaagatcgctctagtctcgaccgtccaattcatctcggccgtacacgcattgcgtgaagcgctggaagaagctcttccgtcccttcctacgggcgtcggcgctggttcgatcggagacgaggaaaccgtcaagccgggcaaggcggatttgctcaggctcaaagcagaggaagtaggagtttggaggggggcgtatgaaattgtcatcccacaggcgaaaccactcagtccgggagaggtcttgggatgtaccgcgcccaaattggacgacgacgtggatgccttgatgtgagtctgacctgctggactcctggatcgactaccgatagctgaaccgatgttgttccctgtcgtaatcagatacgtcggtgacggccgattccacctagagagcatcatgattgccaacccgtcctgtcccgcgttccgttatgacccctacgacaagaagtttacgcgggaggggtacgagcacgaagagatgcgggatttacggggtgaagcggtgaaaaaggcgaggcaaaacttgttgaccggcgagatttccgcgccgtccgacgagacggcggtctacgagggtaacgctggggcagctgggttcggtgtcgtactcgggactcttggacgtcagggtagtctgagcgtactcaaggtgagtccacacgccccaccctctgactagacctggttgttggcactgataccaacatatgcagacgatcaaagcgggtctcccaacgccagacgcctcgacagccgagatccctccttatctcctcctgctttccgaactctcaccgcaaaagctcgacctcctgccgcactctcagctatcgacattcgtccagacgtcctgcccgaggctgagcatcgactgggggtacgccttcagccggcccttgttgagcccttacgaagctagcgtagctagcgggaggatcaaaggatggcaaggtctccgattggaggacggtctcggcacttcgatcggagaaggtggctacccgatggacttttattcagtgagcctgcgctcaactggggtctttcgcacgacgtcgatgctaacagatcccgcgtacaggacgagtcgttgggaccgtggacacctcgacacggtatgggcagaccaaagagggtagtagcgtaaagtctggcgttttacctccaggcatcgtgtacaatcttgtgtatcattacaatcgtctgttaaatggcctccaggcgatccatcttatgcgggtccaatgagttggaagatgacttttctcaagaggttggacaatgcttgtggctcgtgctatgcacagtgcacacgtcctgatcagtatttcgtctaccgattcatctggagctacttggcacccaccttgtatgcgtccatcaccattgccatggccgcggctgccatgatactttctccgaacggcacaataggtagccaggctctgcggcgggcggccgaatgtgcggactcgagcgcctttggcagaacatacattgctgaggaccgcgcacgtcagctcgcggacatgtagcggtcagtttttgtgcatctcacccaattctgcccgccgtttcggctcctccacgagcaagctcagacacgtcgagaacccaatcagccaaaagacctccttccgtcgcaagacgtgtcggagccaggtcgggatcttgccaaagaagccttcaagcgtttgagtacgaccgcacaacaggcctatccaatagaacccacgggtgagctatttccgggattagtatcgcggtcatgatagacagcgcaactcaccttggtagatcatgacaaagaccgagaggaacgaactgctccggatcgtcccaacggtggctttccccaaaagactgatcgggtctctcataaagtgtttcctccgcaaaatcaacatggggataaagtgcagcgccgagtatactgggagtgcgaatcgctgtgtaatagtgattggtcggtcaaagacgctcgcgcattcgttgtgagcggcgccgagacttacgaagacttcaaagtatctttcaaacaggacgtagcgacacgaatctagccaaggatgaatggccgcacacggaactccatccgggacgatcccctttgcgccactctcgatcaggtcccgtagccgcgatgcattcgctgcggtgatgtgctatcatgaaccgatgcccatcagctatcaatcggtagtagagctgtcgtcgatcatcaccttgtgaccgagcgcgctctttgcagcctcgatgtcgatggcagcctttctgacaatacccttgttgaccctcactgcgctcttttgcactcgagaagccgattgaatcctatcgtgccgaccaatactatcagctgagaggacggtggggagatgtgaagtcggacttgccatgaattgtactccggtgggatagttgatgggctcaagagaaacgcgaacatgatctggccgcaagacagtccaaagacgatcatcgatccaaaggggaccttgtaacccgtcttcgcggagacctgattgtagctcgcctggagaccacgtacgaacattctttcaagggggaaagaagggacgatccgactcagtcttcccgttcttaccaatcctgatgctgccgtacttgtgctcactgttgagacaccccgatcctcctgcccttgtcttcccataaaaggcctaggctccccaccgcacccgcaatcgctgcttgccatctcctctcccccgtatcttcttcccccatgaaatacccattctcctcgtccgacagccgggaaggtggtccgaaagtcaacggagacttgtcaccgttcatgatccggatcagacgtttgcggacgtaggaaaaaggcggggccaagcggaggagatgcagggtgagggtattgagaaaagtgaatgtacctggagagacaaagatcgggtacgtcgagttcaatgtcagtgggtttgtcgccgaccacgatcaggatgttgcaggcgcgcttaccgatcatggctccgaatcgaaaaggttctttccccaggatagcatgacgcaggatcgcccactttagctttctgtcccgacgacatcgagcgagtcagtacgggtctacaggtcagtatgggggacgaactcgcctttttcgaaatgtccgcatgaggagcagcagcaggttgatccccgccctgacggtataagctaggacgaacgatcctgcataaaccgcccgacacccaagtcatcgatcgacctctcagctttcccacttcatataaatccacgtaaactcgttagactcactcagtcctcttctcgaagccaacaccaaggctctctcggcgtcgtttggcatctttctcgtctccttttcgtccctccagagcatactcttgcccgtctcccgcatggagagcaagaacctctcgcgttccatgtcatcctgcgcgatagtaagcaaggtgtcgagggatgctagggagattgtcctccggatctgggcagctctgaggaggtatccaggttgaacgatcagtatagggaaagatattttcgagttgcacggaagtgatgagacggcgtggcgcggtatgactcacgtttcgctgatgttgggtgtacccggatcactcctccccgcttcccaacctctggaccgtctcccttcttcccgctcgacatcttccacctcgagcaaagtcgtaaacctaagtttcctactcgttgaagctcggggcgtttctcctccattgtccgagccgttggcggaccgggtctgggatgacaggatggaaggtaaagggttcttgttggtgaccggcgatgtaggcgcactacgggctcgcccgtcgggatccgacattttgtcagaaagacagcatcgaccgtgcgaaggataggccgacaactttggacgcaagtctgacaagtctagtggccgtcgatttagtcttgctttggtcgtctacaacacctgaatggcaaggccatggtgtggggtaggtagaaggggtgaacgcctgctcgctcgctcgctctctctctctctggctttcggtctcgcgcgatgataaccggagaagaaatggaaagatgccggcaactctaacatggcaacgtcgtcaacccgatggaccgatcagctcttcaatccccctcgtcgatccagtttccctgcagaaaacgttcactctggggatgcgaggttcagaccactagtatatattattgaataacggtcaatctaagagacactgctcttctcgagctacagtcgaccattcaaaaaggtcgatgctctgacaaataatgttgtacaacaaacgtctcggtccaggcgtcgagtatatcaagcccgtcggtcgttttcgaatatagaactagggggatcgcctcaccgccacgggcgactgacacgaaaccccgatatggatctgacttctttctgctcgtcttcgtgttttgacttgtttcactcttcaccggaatcctcaatctcgattcgcacgctgacgttaggacgatgcgcctcgactgtgcatgctctggccgccaagtggaggtcccggttgttgagattgagcttgttgagccgaaggatgatgaggaggcatgttgccaggaggtgcaggagggtagttgttcatcgagaggtacccgctaaaaggaggttgctggtacgtaggcggaactccataggcgactccactagcagcagccgcagcggcagcaccgaccctaagaccttcgacttctcgtcgcagaccgtcaatctcccgggccatgtccgagttgtgacgcttgagcgtctggatgtggtcgacagctgaagtgcaccaattcaagattagcgtcgagactcctagaagtccttgctcattgtctctgctacccacctttgctcaagatctcccacttgctcgacttcattcccctatcctggggcaactgatctctcagttcgtcaaacaagtccctcatctcctttctcctcttcctctctgccaacttgtgcgagaccctcaattcgggcgacctcgagaacgaagctccgccgatggcctccttggtatcaggcgggagcgcgttgaacgccgaattgtgggctagaccgctcacggagccttgtcggtcctgaaccggggtcgaatgttgagaggaataatgacccatcgactcgcccatctggttgacgccaggttccatatagtgacccgaaacggacatgacgggtccgccaggggtcatcgatgtcgacgcgcgagagtcgtgcacagagtctggtccggggccattcatgtatccgcccatgtgacctgcagaagatgagaggagatcagcttcgatatccttgtacggcgagtcattccctcggggaagtctcgtcgctataaggggatcggggtaaagggcagacgctcgatcgacatactgtaaggaggaggagcgtaaccgcccttgtcagacatgagcgagtaactcgtggtggaacttccataccctccagcagagctagccaaggatcggttcgagtacatgctcgttgaagaatcccgtcggtccggttgctgattccaccacgaattggctgggatagaacctcctggtacacccgactgagcaggaccgccttctcccggaccgatgggcggggatccggtaggtgcgatgcttaaatgagacattctcgaatcgtacgtcgatccacgtctttttgcgggcggttctagccggtcgatcgaggtagacgaagaggacgggtgttgtccaaacgggttcgaaaagacgggaggaggtggtacttggaacacgttgttatggctcgtcgagctggccggattgttcgaggtcgaggacgaatggtgaggtggctgatggtgatgaggtccattggtctggatggccggagacggtagcgtacccggtacgctcccttcatgcgacgactccatgtacccagcagctcgatcatgactctcttttcgctttcggaaagaagctgatcccggtcctggaggtccaccagcctgactgccattgttacccgaccccgccctcgtcgctgaagacgtattcgacgaggccgagttgggcatgataggacccgctccgagaccaaggggagaaggatgcgtcggagcgttctgaccgtggtaagcaccgccgaccctgatgggttcgagcgggttacctgcctgtccattcgggctgataaacgccgacgtggccaaagagtgacgtcgagccgtaaaatcaaattcgggcgtcttgcccagtccgtccctcgcttcctctgcttccgcttggcgctgaggatctgacccggccgccttgccctcgcccgtctcacgggctgcatcccctgcctcggtcggaacttcccgtttgaccatcgtaggggtaggcgtctcttctctctgtccactcattggcgatcctgatcggcggtattgttgatgctgttgttgctgtgatgacacctgtcgatccgggctgatcgattccgtcattctgatatcgcttacgctgttcctctggaacaatctgggacgttgtgcgacgaaaggggaagctttcgcgtgggggtaatagagggaacgggtcgaagtcgaatggaactgtgatggtggtctactcgatgtcgaagatcccgatgatgacgatgatatctggtgtatggagagaagttgctgtgatggccgccgttcctgttgagacgcggggacttgtcggtgagatctaggcggagtcgacgatgatgacgacgatggtacggcaggctgtgatcgtgatagagtcgcggtcgaaagcgatggcggcaggggtccggttcgagccgactttatccaaggctcagacccgtactgacgttcaggcgactcgggtttcgatcgtattgacttttcactcaggtgcaaagatcgttgatggacgtcgacgatcgcttggcggtttcgaagtgcgtgattggtcgacgcgttgcagaggatcgacggtggactcgatcctatacgcaattcggttctcgtaaagagactcctcggcgagtttttgcttggactcgctccgacgctggcggagatcggtttcgaggtagcggcactgttgacggacgcgttcccgttgtagacctctggcctggcgatgcgtctagcgatgcgcggaggcgatgtcggtctggcttccttgtcgaccttgtgatgaagctgatgcgtcaaactttgtaccggcggagaagctcggaccggtgggaactgatatctcagaggattctcaaaagtagaaaacgggggtaaccttgcgagatcgtcgtctcgatccgtctgtttcccgttaggaacgatcgcgccggcgttgtcgtcctcgtcgtcttgttcttcctgcgtcggtggatggaccaggagcagaggcaggtgcggtttcgaaaacttgtttgtctgcggatgattatgtgcgacgatggaattctccgagcgaggtcggtgaatactgtcaaagtaggcaatgcagagtatggttaggaatcgatgatgatgacatgatgatggaagatgatcgcgtcgggagagacgagacaagagacgagatcagagagaaagatcgtcctcttcccgtcacgtcgcgcatcaatcgctcgtgacgagatctagggatggccgggatgagtctgctcacctgagtctggtatgatccgttgctaaactaggggaaagtccacgttccataccaaggtccgggaatcgtcaagtggatcagagagtacaggtcgacgtcggtgacggtagtaggggaaccgagaggcagcgggtcaggcagtaggtcgtgttgtgcgggtcagttttcgtcgtcaaatcatcgatgtcgaatgaggaaaaggcccagggtcagggttgtcgtcgagtggaaagatcagctatgcgtctttggattaatcgtagcaggtggtgcagtatgacgatcgtcgatagcgagatgaagtagatcgatgatggactatacgactcctatcttggacgaggtgaaagacgggggggggcgggggagggggaacagtcgtgccgagatcgactcacgacaatctatacactcccgtttgattcgagcgagtggtccttgagaaagtgtactgcactaccgaggatgaggtgtgtaattgagttcagggtggaatgggatgggtggagggttccggggcggatgaggaaggggtgtgtgctgagtgcgagaagagcgtgctttccagagaggagagagtgtgtgtgggtgggtgttgtgtgagtgagtgggtgggcaggaggagggagcaggtggtgtgcctctcgagccccgggcgtaagagccgacgggggcgggcgcaagtccagggattgagagcgagagtcgacctgacctgacctcgaaccaacgcgacaattcctccgattccgtgtggctacaacgctttctcccctctctctctctctctctctctgtgtgtctccttcaatgtgctctgctcactgaggtcctgatgcgatgcgtggtcgattgcacgggtgcaagttatcgcccggcgatgatgagtctgaacgaggacgagaacgcgagaaatggacgcagaatctcccgaccacttcgctcgtgggaggctggctggctggctggaaaaaagggggtaaaaaagaaaataacagcgagaaacgcactcttccttcctgcctctcctcatccgcctactgctgctgcgtggaaacggcgagccagacacgatgcggcagcgttaccgttccctccaaactgtgactctcgcaatataccaccgggcgacgattcgattcccgaccctgtcccgcggaaggcacaggaaaggcaggggagagaccgggtcccacatgggatttcatctaccaaactctacctcggacctgaaccaaaaaaggaaaaacagcgatagaggcgaacagaaaccgctcggtgacgcctcccttctgcgggctctgagaaccgagggaatcatacttttcatcttggttcggtcgcgattcggacgtcttgcagtgcaacgaccacgtcttcgctcctcgcatgggtatgctgcatgttagctcgacgttgccgatcacggaagagatgctcgggagcggaagaagaacaaggacaacgcgcaacgtgcgaagtgccaccctgcggctcgaacgatctaccatctcgcctcgctcgctgaccctagcagcctgtgacgttgtgattcgtttcagggcaaccctagtttagtgcaatcaaggtagcgaaggagggtccgatccggcccgcgagctaaatgatttgtgcgatcgtgacgaacatcgggctcggatcgaggcgcacacccgaatgatcggagatttcagggataaccaaccatctcttgcgcgagaaaaccctagtttaagcgagcgagatggcgttgaaccgttctcggtttgttgttcgaacaggaaaataccgcggcccgacgattgctaccttgagtcaaggcgtctgccacttaggacatttttgagatacgcaccgacattgcttagaccccgctcaccgaacgccgctcggacgatgtcgaaagtcttgcacgaaacactgcgccagatcgccatctgtccgagagcctaccccgggccacgtcggccgagccggctcgggtcgatctttccattcggcccatttctgcatccgctcgacgccagtcccaagccctcggaaatggaaagcgaacgaccaaggaccgatcgaaatgaaaagtggctgcgtgggcttttcagacttatggtcctgcagcgccctcccgtagcacaggcaccgtcgcaagagtgatgcggcgatctcgtggtctcgacggtgccacagtccccactcggccactgagatgggctgcggaaattacagtttggacgatggataagctcatggttacggacatgaacaaggttgtcatttccctaaagtctatctatgtatcgtcgatcgcattgacagccttcaaaccttgactcacatcaacaaagatggcaccgaatttgaatgcggcgatttggcatgccctcagttatggactcgcttcgattcttagaaaaaaagaggtctcaaaggcttccaccgctcatgtacctggcggatcgaagtgactttcggctccgcgggtacaaggcacggtggatcgggcaggcagtctgttcttctattcttccacggtttcgtttcaaggagagcggaggcaagggggtatcgtgatcgtgatcgtgaattcaagttccattacagtcggaatgctacgactaattgctacacatggtcagatgggctcaaagaaaggcagcaaacaaaggtccaaaattgtacacgagcgagacggggtatctttgccccgttcgacatcctcgcgtagatcgccatctagaaatccagcatgtgctggacggtcgttcgctgtttacctctttctcaaccttgccgagcttctcgtccggatggatccgggcgcctcggctaccgattcctccaccgcagctgcaggtgcggcgacctgacttcgcgtgccgaccgttgcggcccgcttcttgggtcgaggggaatccatctcttgtgccttctgcttggccggttgatggctggtcattctggatctgagagcgcgtccagtggttgtggttgtggtcgtggtcgtagcagaaatgctcaatcttggcgtatccggggtcgaggaatcttcatgctttgaactggttgccgcaagtgggtcatcggtcttgatagtcaagtggtcggcctgctttcgctttaaacccgtaccgttctgcggctgtccgagcgacagcgacgaaggatcttgcgaaggtggcaaggacgataatggcgacgatgtctctcgccgtttcctgtcctggtcttgagtgtcgtcccgatcggcctgctcgtcctcgtgtggctctgccccagggccaggcagctccacttcaacatccatctggcctcccattcgctgcatggcaagatccgacgttcggtcgactgccacctggatcgccggtccggtcgtattgccctgcgtgtcaggaatcgaattgggaaactgcgacgcagcggggtcgccagctggactgtcggtagggtgcgatttcgcttgcgtctcggggatagagacggggacgtccgatgtaggccgctccaccctgctagtatttcgcgattgtcgggccactggaggctgagccagaactctgtgcccgttttgagcagaacgaggctgcctttcctggtcacactccatctgatgcgccccgtcagacatgtcctgtggcacttgcatctcgaggtctccgtcgtcaaacacagacgactgcccggccaattgcccttgactactatcaagagagaagaaattgcgccgattctgcgccagtcgaccgggggtctgaagattcagtccccgcattggctgactaaaatcatcgttcgactgcatgctgccctcgaatcgatcgatgcgaggcgtatcgatgagtccggcggtcgagtcgcgtgtccagcgatcgtcattgtcgtagtattcattaagtggtcgttggccaggcggcaagagccactcgtggtgcaatgcctcggttagcgtcatccgctcggcaggatcccgctcgaggagcctggagataaagtcgattcctgttgagaaggatttcgagcatgagcacacagtggaggaaacatcgtcgctcatttagagccacctgcttcgctgataccaatatcgaacagcagatctgaatcaaatggctggtccagcctctttcgtatccgaatatgaaccgggtcttctggatcctcgtcgaatggcatgttctgtattctcatcgggcagtcagcaagcaagcctcgcattgagctccaggtccgaagcacttctcacattcgtcaacatgccataaataatcacgccggttgaccaggaatccacgacaaattctgttgataggttcgttatgagcatcatccttccttctggagcgactcacaacggctgcactcaccatagccaggttttgctgccgattggcatacaatctccggagcaagatattgaggagttccgaccagtgaccgcagcgctgtaagaggtccccgtcatggtcagtttcattcgatgcgcctcgcaaaaggccttatggtttacctgttccctctacgactgtcgtcgtcaaggtgaaccaaattgcgcaacaactacgtcagagggacatcctcgagacatttccaggcccaacttgtactcacccatcttagccaacccgaaatcggcaatcttggccgtcggtaggccatccgtccggtgaaccgtatcgagcaggatgttttctggtttcagatcgcgatgtgcgacccccatcgaatgctatatcgggccgatatactcagcctcacggtcaatcggaacagatctgaacgcgcagcttacgatatactgcgaacgcccagcacgatcgcgtcaatgttgttctcagcggggacggttggagaacactcacagccatgccttggcatatctgtctcgtcattgaaatggcctccgcttccgctgcaaaccgatcaagcccgtcagtcgcgctttcaaacaccgattcacagtcgaacgccctcgcactcacgtaaacccggcccggggttcttggcctttttcaagatatagtctagtaaatcccctccgttaacgtattctagtacctgctcgtgatgatgtgtcaactttgccctctcgtgcgagtcagtcagatcgactcaccaggtacaggtgttgagggtctgcgacgacggcgatgaacgagcagatgtttggctacaggcaatatcatcaatcctgatcagccaaccgtcatcacggtccgacatgaaccacatagccctcatggacggactgacgtacatgttgtagactttgcaagatcgagatctcccgctcgaacaattgcaatgtcttgggattctgtgcgaatttgtgtttcgtaatacactattcgttcgagtcgacccggggtttcagctcttggaacctacgcgagtcgggatcagagcaagaacgacgcaccttgatggcgacctgccggccggtatcgatctcggcagcctttttcacctctgcgaacgctcctgccccgagactacatcgaggttctcgacccagagacgacggatcgggtcagcaccgtcggtcctagtgagatccaataggtattccacctttcgagtccgactcacgtttcgagaaagacgaacctctcaaagatctcccctaccctaccctcgtccccgaccccctgcttgcctacgctcttgtagatccatcggacgtcgtgattcatctgcgggacgggtcctaccgaaccgagcgagacctcatccccgtgcctcaagacgtgttttttggtgattcgttgagaattgacgtacgtcccattggacgaaccgaggtcctcgatgatgacgatcggttcgttcgacgacgtcgatgggtaaggtgtcatcccgttggaattcgacgtcatggtctttcccgcgccgacgaggtcgagttcgctctccccaggcatgtctgcaggatcgtctaaccggtaaatgacgcagtgcctgttcgagatccgtttcgcgccaagagagaggtcgttccatttcggactaggacctcgtcctatcctgacctgtccgtccgctcctaggggtctggaattcacctgagaggctgggtagtggatgtccagatccgggtggggtttatcccagtacaatttaagctcgggtacggatggagagagtggagtgaagatggcccctggtgtaacattgaaacaaagattcacccccgatcagtactcgtatctcgactcggagaagagccagatgcgagacatcctttttcgacactcacagtacttggatttcgggttgacaaacgtgcttgatacctcttgactctcctggacgggcggactacactgagtctgcgtcggttgccaactagctcctgcctgtgcataatcctgtgaatccgaaagctggccgtattctccattgccattcccattgccgtaaccgttgccgttgccgttcccgtgggcatatcccattgcatgatgggatatgggaggagctcctagctcgagatcagagttggagctctgatttcgatcgacattcgcatgatcctccgagtcactacgccgaggggggggagcgaacgggtctagctctagccgggcgtcgcctgcagggttgggaggcatgggagtcggcgtcgagctcgagaggatcgagggaggtggggatgatcgatggggaagtgatctgaacggactggacatgctcagcgacggtgattggaaggacggctcgagagtcgagagtcgagttcgcggaatgatcttccgggatggacgacccggtcgaccgcacagggtcgtttatcacgatgctcagcaacgagctcccgaacccaggccttgttcctccaaagatacaaaggctcagatcctgcttcccactggatcgtcaagctcgattgagtttctcttgactgtcctgtcctgaagacgatgatatacgacgcgcgaggcaagaaggtccaagtcgagtgagagctgaccggtaagtgatcccgagacgagggtccctttgagcgggaaggacgcgcgtttttaccgaatagcgggggaggatgtacgaagtggtctcgtcctggtttaaatgagtctatctagtcgttgtcgttggtagctgtagagatgaatcaaggtgaaagaggtatgaacgatgtgatcacaggtcgctactgtctgtctgtctctaattcctctcaaacgcgtcaaacgcgacccgagatttataattaaacaggggacaagcacaggcaagctaggtgatgacgaccatcatcatacacctcgttcaattcgatcaactacgtgactaccagctacttgcattcatcaggagcctctttaaaccaacatccagccagtcctcaagtacaactcggaaacatggtcagagtaagtgcctcattccaacgattcgcgtcacgagatcaccacgtatcgatgatcatcctgatcctttcctcgctcggcgtagccttcgagactgagcgacgatcgaccggcatgtcaggacgaaggtgagttcatacccatacacacacacgtattggcctcgcaccatcacgtaaacccccaaatcgatcattcaccgactaccgcttaccggtcctgctggatccccctccgacacgacgaacagcatgcgcaatccaatcctgcctatcccgcacgtcgtataacgaacagaaatgtcaatcctacgtcgacgccctgtaccgttgttgcgcctcgttctacgccaaggccaatgccggggaatacaggaacctcgggggagctgatagacagggggtcaggaagagtacggcgtgtcccttggaggaagtggtccagaggacgatcaagaggatggatcaggaggcagcggccacggcgggcgggaaggacaaggcgtaaggacaggtcggtggggtcaggagttacagtagacgaaaccaggcgacacggagatggaaatgcaccgatcgcatggacacccatgatcacgtctatattgatggatcctggcatcggacatcctactctcgatctcatgtcctttacaacacgcacgcaaacgacttcacccggcccgccctcgaacctagatgctctccctctcgaccccgtaatcctccttggcgcacctccaaaactcttccccgccgttcacagcaaacctccccgcatactcggcttcgagggggtgcaacctccccttgcccttgtccgaattgcctccgacgatgacgagggaatgcaacggtcccccgaaatcctcctcggtcaactcggccatctcgctcaacgtgcccgatcggatggattccgtcggggtacctagccgggagagcgtcatgatcagggttcgtttggggtccatcagggtagtgtagaccgggtagtgcgggatggtcggatcgggcgaggacgagcgggaagtcgaccccgtggcgggttcgtccgtcgtcgtcgacccgcccgaaccgggctcgagtttcgacggtgggtgtcgttcgttttcagtgtagagaatctgttggatcgccgtatgcgggttcatgaatcgaggaggaccatatcgcatgattcccctgagaggtccagcgatgacgaaaagagtcgccgcgtgcgaatcagctcctaacggtattcgcgagatcggccccgattgacaaactcacttgatcatgtcctcctcggactgttccctgacctttatatccagcaagacgcaggtatgcatgcccaacttcaagttctcctccaaccgatcgtaccaactaccaggcttccacgagtcggtgtagaaacacaggctcaacgtctgtccgaaattgtacagctgcaaccccgtcgacccgagcgcggtcatgatcgacgcgttgtggatgacttgacaggggatccctttactctgcgctcggagcaagaggtccgtatgcgtcgtcgccgcggtaggatccccgacgacgagaaaggagacgtccacctcggccgcattggcgaggatggaatcggcttcgagttcaacagtctcacgggtggcgaggatgacttctcggccgtagaattcttcctgcgagacgaggtcggattttgggtcagcttcgtagtgagcagctgctggacgcgaggtggtgactgacgagcttggccttgtcgatcatcaagatactggtataagcctcgagatacaccctctcgctccgcttgacggcctgtcgagatggtcaaaccagacgtcagccacgagacgatcagcgtgctcgttcacggcgttcccgggctcactcacttccaaccccttgaccgtgatatccttctcatcgctgagaccgagtccaataacgtagagcatgatggttcagatttacgtttgtattgttccttcatgggacgatcgactatatgttatccctgcaatctgtgagtgtgaagacagaaatcgagagctcgaggttagtcagggtcgaggtaaaatcgcccggaagctaaaagtcgacgagaggatatggtcttcggatgtaaatagagtgacctgttaccaaactaccctccctttactgatctactacattccagcgacaccgaacgccctatccacccaatgctgcaagatcctttcccagcccgatccgatcgccttgtcatcccacaacatcctccacatcacgcccccgctcagccccagcgccgcgccgacgagcacctgggcgagcgtgtgataccctatccggaccctactccacatgatcgaggtaccccagacgaccgtacccaatgccattagcccgcctgaaaagccttggaagagcccttgtgtgtcccgcttatttgcggccacgggactggcgttgaagggaggaagggagaggacgaggtaggccatgtaaaacccgatcgacgtcgaatgcgtggaaggcatcccataagtcttcttgaccttcttcttcggccgccgggaggatgagtcttgcgggtcatcctcgatggtcaccgtgggacgatcttgacggatgacgttcttgctcaatttagctacggatgggagaggatcaggcgggtctggttctgcttgttatgaacgcgcatgaagccgaggactaaccgaacgtgttaaaaagaacggccccggcgataaagtagcctacatgcgccgatcgagttttcaggaacgtcaatgctgtgatccctgtcacgacaatatgggtctggacggtagtcaagccatagtttagcgttcagatgaacgggattaggagtggtgtgtgtcgagaacgcggactgacctggtcgagcagccacagtgtggctcgttgaaggttcaccggcatgactagatgctttctggtgcccgttgtgtgtagcctttagcggtaatgaggcgaggtacaaacttgaaccttttgctatgcgaccatttacctgagatcctgagacgtagatcactctctcatctggtcgtcgtcatgggccggaagctatttatccatcgaaccggtcacttacgagattacgagattgcttgtgatatcacgtgatttagtcgacgtcttgctgatgtcatcactcattcagtccgtctgtttcatagtggccgtgtactgttttaacgtgcttcgtgataaatctcacaagcaggcatgaagtctccaatctgaaacacacctctagcaggaagagtacaatgggaaacgcgcactcctcatgctggtgccaatcgcgaagtgtgggcgaggatgatcagtttcgccgattggcattgcttagcgaccggactcatctgcatgacacgatttgttgtttactttgggaatcatcatagtcatagccacctcgcaatggtccgattcacaagggtttccacggaaaataccgttcgtcgaagcgagttcctgatccggtcaatcggctttgcgggtgcggctgggatgccacgagtgacgactaagcacacgctgatctgtggattcggggtcctgcttctgcggcagtgcgaagcaccggacacggcgcctggacacgaaagcagttatgagacaagaagagccactctatcggctcttcgaagcgattggttcgccaaacgagcatgcgcaggaattgaggactttgtcggtattttcgtaaacagtacgtttctgggtcagctgcatctcgctagcacccacatcgatccgaaggctaagaagtctagaacttttccccgctcttctggtcgtctacctgcagaatgttaacaataaatagtgaagtgcgcacgacgatacagcagacatttttattcatcgcgtagtgcgccttttgctccacaagaccggttgctcaaacgacgaagaaccagtgagattagcggtcatgtactatctcctcgaggtcttcaatcgtaaggttttttttttcgagcttcgcctggtcttgtgcctcctcgaagagctgggcctcgcgtccggagagcctgtcaagaatgcagctggaatagatcacctagacacaatgaagttcttgttgcggttgtccagacaactaatttacatggtcgagatccgacccaataatctatacactatccggatggaacgagcacactgcgaagtgaggcgtagggaactgacatgaggtgatgtgaggcgatgtgacgatgcatgtttgctagagaaaaggattggtcataatctatagttgagccgggtaggacgaagaagggaggggggagggacggtacccgcgaactgacgatttgactggtttgacctccagaactccgcgtcatcacctcacaagtcgtgccgctggttcgctgattgctttcctagagttccaggctgtgatggcttccgtgagtatctctagaccgcagaatagcagcgtgattgttgttcatctcaacgctgacattgacaaggccatcagcggtaggtagcaagtggcggactcatattctgctcgtcgagaagggatcgatttcgaagtttcacctaaccgtcaaccagtcagcgcctcccctgtcgaccgagaacgaccgatcgtgcgcctcttttgtcctgccctgctttcagaatcccactcaccgccatatagctcctccgtaggaagatgtggcccaaccttacgcccgcatccaggaccagacatctgatatcgaagacctcaagcgactcgccctggacaagctcgctcaaatccttggtcatcatctcaagcccaagctcaccgctccaacggtcatacgcgtccccgagagcccgtgcgccctcagactttggcgaaggcccaaggccctcgacgcccggatcgacctagctttatttagttgaagaagcacgcccaacgcacgatgagttagatgatttcacgctctctaatattgcttgaatgggtcatgtaagaaaaaaggtatcaggaaatacatctcgtcgtcatcccttcttcccgaggtctaatcctctcctctgctcgtcctcgcgttctctccactcatcgtggtgcctcgctcatcgtgctcttatggaagtttcttcttctcgagatgggttggcgcgatatcgatcgaactcgtctaataagcacatgacgcctcccctacccgggtgttcaggatcagggccacgatcaggccgtacagaccgatgacctcgctgtgtacgagagcaagcgacggtgtcatataaaacgacggatatgataagagcggtgggaacattgtcagtctcgtcatacgagcagatccaccgccgccggacaggagcagcggggatgttttttgggggtactcacgcgaaaatgaggatgaggaccatcgatacaaagaccctcgattcgtatagatacgctcgtacgcactgttcccccgtgcagcgacatttcaagcatgaccaggatcagcatcagatcctctcccgaattccaaatcgatcgagccgaacccgaccgattggtgaaacagtggagactcacggcatccccgacgatcccgatcgcgtatccggccgctaacccggtcatcccacatgccaacccagctccgaggtggacgaacccgccgaatagggagtaaggttccgatgggttgagggaacctgcgatgagcaccgagacgacgaggccgtacaccgcgataactagagtaggtggatgggcagagggaaagagagaaaagcgggtcaatggaccgtattgggagtgtttgggcgacaaggggacgtttcgcctggggggacttactaccgctcatctatagtccagcacaccaacggatcgagatgaatatcagcctgccatacaacaacaacaagaccacgattcgaaggcttgggggacttacgacgacggggattaaactcttcatcatcaaatcgggcctgacctgaccgagaccggcgataccgattccggccttggcggtcccgtaagcggctccgatggtggagaggaccatctgaacgttcaagatggatagtgatcgggattggagggtggcatcgacgtggtggagatgatatgagagcagcagggaaagggtataaggcaggagatgtcagttcgcctgtcctacacgagacaagaagtgacccaaaggctggaacacttacggcggctgtcactccggcgaagctatcatccgtgtcaataatagacataatgtgtggtcagcttctcgcccgagattgtttcattccgaggagcagtcgttccagatacgacatgctctcctagccaagaaaggggaccgacgccccgctggttgacacgaagaggcttcaagactcacccgaagaagggagcccaagctgggcagagttccgacatgttttgacccggggtaatctatgatctatgagcgtgtgactctgggagaaacacgaaagggtaaggttgctgctgccacttgtcgaaggtgctcaatttgaggatcatgatcaacatcatcatcatcgatgctccatatcgatggcgagaggtgatggacgcggacatcggcacgttactagaccttaggtgggggggacaagggcggacatcagaaataggtagtctctcaaccacccccctcacggtctaacacagaactacgactactacagttcaatgatagaccatcacataccgcccacccaccatgcaccacctctcatcatacctcttgcagaacgaaaccaccgtgaactgacgctcaaaatggacggcgtcttcaaagttcccgagctccccgcctcaggcggatcgaaacgtaaactcccttcgtcctcttccaacccagacgctgcaggcgccaaacgaccgaggacgacaaacaatgccgatcctctggccaacctaagtaagatccctaatcgatcaaacggtcaggcggggaacggtaatgctccgagtatcccagtcggtttccctacggacaagggcaagggaagagcggcgaccgtcgaggatgaagaagaggaaggacccaaggacatccgcatgcagggcgacgaggaggaggaggatgacgatggggtttacggagtcgccgaggagacttttgaggcggacgatggggatgaagagggaggaaggtttttcgggggtggaaccaacgagacgcaagaggtgagctcgatggacttgctccgacgcggcccggtcgcgcctacagtacaaagcacccagagctgatacacgttgtccggcaaaagcgaatcttggatatgttcgccaacgttgccgatgaacaagtgagtgttgctttccgttcactcattttcgaatcggcgctctatcgtctgacctgatcttgcttgccatgaccgctaggcgacgggtctgccgagtatcccggagttgaggaaacagatcatcaagtttgataggatcgtgaggaagaacgccgagatgaggagcaagtatatggatgagcctaccaagtgagtctgagcgcctgcgctgcaccgcgccgcactgcgccggcagatccaccactttctgctaccgtaccgtctgggtccagcccccgctcgcaagctaatcatatcgaacgacgtaacgaacgaccgccgcttgcgataggtacctagactcggagaccgacctggaccgatcattcacctttctctatcccctccctcaaaaccctctactctactacccagaaatcatcaagaacgagctcctcctccccgacctcatccaactcctctcgcacgataatacagacatctgcttgcaggtcgtctcggccctgtacgagatgacggatgaggacgtcggagaggatctggtagaagccgaagaggacgaagggaaaaaggaagagatggggaccaagttgaggatgatcatgggggacttgatcgagttgctagtgagtcacgcatggccgttcataagtggattgacacaccggcaaggtcgactgactcggtcggtgcgttctcccagctggatcaatccatcctggaactgctcgtctccaacctcgatcgcctgaacgaggaggacgaagattcagatcggacgggcgtgttcaacattctcggcatattcgacaacttcctaggcttcttgcctccgctcgccaaccagatcgtcgagcagacgacgctcttgccctggctactcagtcggttgaccgtacccgcgtacgacagcaataagcagtacgcgagcgaggtcctggcggtcttgttgcaggaagagagggcagtgaggatgaagctggccgacctgggtgggattgaaccgttactactggccctttccgtaagtttaccgtgattctgatgtcccgccctgtttatacgcaacgtaggggactgatttccggacctcggtctcgcaccgcaaccaggtctaccgcagtaaagacccaggcgatacggaggaactcgagtacatggaaaacgtcttcaatgcgctctgctccgtactcgccgagcctgaactcaaacacgcctttctcgaggcagagggggtcgagttgatggcgttgatcatgaaggaaaaagtcgtcgcgaggacgagggcgatcaaggtcatggcctacgccacgcaaggagaggacggaaaggggtgttgcgagaagttcgtcgaggcccttgggctgaagagcttgttctcggcgtttatgggcaaggtcagtcggcggtattggctttgtaggccggatgggatacgagtgatgctgataactcgtccgcgacgtctgcagggaggacctaagaagaccaagacgacggccgcctttgcgacctcgccactagaggacgaggaacacatcttgtccattctcgcctccttgttcacctcgctcgattccgagacgccggcgagaatcaggacgctggccaaattcgtcgagaatgattacgaaaagatcgaccgactgctcgagatgcgggaaaacgcggtcgggagattgagccgaacggatcgtgagatcgagatggagaagcaggtgcgttggctggcgggaagtttgcctggcaagctgccgacctgacccgctcccaatgcagatcatgcaagaaaacggcgaagagatcaccgacgaagaaaaggacgactggtacctccgaaaactcaatgccggattgtcgcatcttcaaaacatcgattacgtactggcatgggtggttatggaggacgacggggtgagcttctgctctttacgaaatgtctcgacacgcgtcgctgacgttctcgatttgcaggcccagaaccacaccaagatgctactcagccgaaagggcaaggacttcacagatgtgatcgaagtgttgaagggtgagagagttacgcttccaatatcagctgcggacgctcgacactgacgcctctcgaaccacagagttgagagataccatcgcgtcggatgccgaggtcgacaacgcagacgatggtcaagcggatgtccaacccgacaaagtgacgatcctagacgcactggtggctttctgccagcagctctaaatccacaagcaaaaggaaagaaatcggtaatgccacagagatttgagattattgtacacatcgactagatcgtcttagatgcatggatcgaaaggtcgcacagagcaaccttttgggcgacagtcttctcgaatgcagtcatgattgtttcgttatgtcagaatcaaagcgaacactcgaaatggcggattcttggggattccggtatcgccggaatcagtcacttctttgttacatctcctgattttcctcttgctcttctaacatattccttagcaattatcccgagtccatgctcccccctcagcggtagacgaataaggcaagaactgccgacccatcggacggcgttgtcagcctcggtgtcgcgatcatggatcgataagaatagctcacctttccatcgagcgtgatgacgactcgatctcccttggggtctgccttcctagcgaccgaggttcggaagtcgatggctgacatgataccgtctccgaactaatgcagctgtcggtcagctcgggttaaaattgctctcgaggtttggaaacttgctttctcagcgataagcgctttgtaagagtactggacgaagacaagatagtgtcagtcgacggtttgttggttcgctagagcaaatgggacccaccccgtagacgactaggacttcatacagacggtacaagacagggtcctgccatttgccggtcaagatatcagttccagatttgttctcacgagcccagtctttcgatcctaccttgggtggccatgtccaggtttccccccggtgtaccatgtgatggtctctaaagctcgatttcagctgttctgtatccagatccaagacttcgctaagtttccctagatcctccggattcggctgtatgaggattggtcgtctagggtcagtaggcgcgcgcctgacggcggcaggagctccatttaccgacatacctttgcttgcccgtaaaacactgctgcggtccaaacttcaggcttattgataccttcggcaatcttctcaaacgtaagacctgttggaggaatcaaagaatcgaattcattgagacatttcaagtgaactctcccgatcgaacaggactcacccttcttggctttggcctcgagcagaaggtgacatgctggagacaatccagcaagggggcctgaagacggaacggagtccatgatgatattgtttcggtatgctctgaaggtctcgcaacgcaagtctgagccacgatgttactctaggctttggcatgatggcaatcgatgagttggagctattcatatctatagcttagggtcctcttcgaatccccgacctgccaaccaatcggtcatctccgtttcattaattgccaccgagacatttccccatcgtcatcgacaaacatcgcagaaatcgcccgagatgatcggccgtcgccaaccgtgacgaaacaacctcagcacgggtcaagatattgtatcgtcgtccgcgacccccattacgggtacaagacctctctacggagactctctctatgcagatttcgaacggtcccttgtcatgcaaataccatgcgatgaacccaggtcaacaggctacccttgtcgattccgacaccgtcaaacgctacttcctcgatgtgctggatcgtcgtctcttggcccttcgtgtccttgtctccctttcgtcgcaaaatgtaggctttgatcgaggtttcagccgaggtcgcaccgatgtcgataacactatacgaagcacagcatgtggtcggtcagcttcgcgcaggaatgttccgcgccggttacgaggatcgactcgcatttttgtctttgccgtgctgacgctaccgacaaggtgatcctttgcaactctgaagcccccatcggacagcccactttcgtgaacgtgctcttcgacaatatccacgagacattgcctgagttctctcgagatgtatgacgggagctgggtcatgtcactggacggaaggtaaacattggggaacaccagcgtgaagctggaagacgaggagatggtaagcgacacgatttgactgtgacagacacgcggcgcaaaagtcagctatgtttctgttcgcgcaagagtacttttcctcgactcaccgaccctctagtgtgacatcaatgctcccgtccttatagccttctgatccgccaaccagagaggcccagtctagtcctcccacctctccactatcttttcgtcggataccaaggtctagaccaaacgaagcgatcgtcttcttaaattctatgaggatttcgagcagccgatgcaggaacgcctggtagtgcagataggggactagcatgcccagaatcgttcctgtcggtgacgctttggtgactcctggtgtggcctgagccggtttcggtctcgctcctccctttgtcctgattgtcacctctttgcttacggcttccggttccgcgggtttcggtgctttccgctcgcgatatatcttgagcatgctcatcttgatgatcgaaaggatcagatctgcctttgccgaaggctttcgttccttttcttcgtgatgatccagatcatccaggttgacctgttcaacagacctctcagttgccttttcgggccgcacatcgtgccaggacggacttactagctcaaagacgagctcctggtcaggcacagcagagatgatgactgagtctaacgaaattcgagcgttaagagcagagttccctttcgcctctgtccgtatctatcgagtatgttagtgattcatcaaagtccttcgttttctcttcccaacgcacttcatgatagatctcttcctcgaacagctcttgaccagcgctctccaaggtctgactgatactggcgtcctctccctggttctcgctatcttccgaaagatcaagagtgctgtataacggaggcaattgggtcttgctggacgtccgtatgcacagtcgtaatcgtcgacgtctcctggccgggatcttgattgtggacgagctcggggctgcatttcgacgttcgtgatcggccgtaggtgggtcaagcgtagctatagcaacgctacgatagggaggtgcggcttcgtcgggagcgtaaggaatcatgacatcggaggcgatctggttttccggagaaatgcctttatcgctcctccaacggggtcgtaacgaccagaccttgttgctgtcactgctaggcccggcagtagcattcgtagcgttggcttcgagccctgtatttccgtccggatcgtgtgggttaccagctaggctcttcaagtcatcccaaaactcgtgctctcctgccatcctgacccgcatctcggcggctcttgtgacgagtccttctcgggtatcagatagaccttttcgattacgcgccaaaatcatctttttaagatccagagcagcgacaatgttggtcggagggggtttgtccgagatcgatgggaccattgtcagagagtcgggggggatggtcacttggttggcgtgttccggggccacgtaaggatgcggatgaccgggaatcaaggaccggatgatctcgctagtcttcatcatctgaccccatgcgagactagaagaagctttcgagccttgtcagcaatttcgtctcgtacaatcgtactgatgtcgactcacaagagcttggtgttcacatcgtgcctcaattgtcccatctcttccgcactcagctcctttcttcgctcgacgtccttatcaatagcaacctgctcatcctcttccataggctcttcggtgacccgaggagctcccgtttctgtgccgttcttccattggtgcacattgtcagcctcgatatctgagaacttgccaggcttgagctcgaacaattcggtgaccgctcgatcgaattcagccgtcgcaggtggtttcctacaggaataacgtatggataagtggtcaacgttgatatcagaatacggatggactcactctttgtatatcggtttccccgttacttcgtcataccgaagtacgggtcgaggcagaccctcgctggaacctggttcgagcgagattgacatgacctcctgcgtcatgacggtgtatccgtccgggacgccttgctactgcccctaaagatcgcccggggcttgaccttcactctatgacgagatgttccactagaaacgagtaacttgaggactcgactgtgttcggtatgtttgggtaaggaggagatgagggtgatgtcaattgtaagttgtggtagatgatggttcatcttttggttgaatgacgatcgacggtctcgagcgcggactgtggaagaacggcaatcgatcagcctggggtctagataggtaacttggacaacctcgactccaacccttcacagatcggacctagcctatcgcatatacctgctctactttagcgagaacaagaatctgtttggataacatggagtcatacgagctgtcacaattccccgtggaccactcgaccgttcatttggcctttttcaagaatgtgacgaattctgcagagttgaggaaacggctcgttgctgcagccaccatggagggcgaggaaggggatcgggaaagggatctactcgattatgctttcatcgaggcgaacatggtcagtcggggtctgacctgagccatcagaccgtaacgaagctcattgtggatggatcgtctggtgtcggcctagtgcaggtggtgaaccgggaacagctgttgacggcagtctactcggcattacaagcagcgagtgctggaacattgaagacaaagacgttacacagcgaagtcctgctatcactgcatccgtcagctacggtaagcccaagctatgtgaggttgatctcggccgggagctccatctgatactcgctttcatattctctccgtccatagccacagatcaacgaagcgctcagaaagtttggaatctcggctacaaccaaaaaccttgtcctgatccgcattggaccgccatcctcgagttctgattccacgtcagaggggaatgaggaggccaaggcgaaacatgagcaacgactcgtcgatgccatgtcggagctggtcgaaggggagatgacgagcttgacacggttagcacaatcagacctcgattggaaaggtctcaagaaggtcagttccagtgtcctcttgaaattttgcgctacggtcccgattcgaggttgaattgaccgacaatgaaatgttgtagctctacaagctgaacgagatgaatctgccttcaaatgcgccgacgacggagaacgagagagacatgctggccgccgtgatcacgagcacgatcgccaccaagaccgtagcgggatgaggattatggtttcgaggaggtcgaagatggagttgctgtagatgatatattatgggccggatcctgcacgacccgtactgtgtacaacgaaggtgattgaagcctgcgatcggcatcatgaagggtgaagtcgattggaatgtatctcatccttatagcgaaatatctgccactggttctgccgatgcagacttgctcgtcgtcgtaatgttgcccctaaacctctttctcatatcgagctgcaaagcggtccagcacgatcgcaatcagctcgaatccgaccgaaactaccaaacatcccgctcttgctcaccagcccctttttgcaattattgaaagctgacatcaagtgcagacattgttctggcaattcttcagggtgttttacacaatcccccactgtccggttttgccgcaagacgcagttggtccgcatgacgcatttgacaaagtcctctcgaattccagagcactgctcgacagtcatcgtggcggcaaagctggtgtcttgagacgtagagtgcgattatgacagattgaattgaaagctatccaggggtaggagatcatggaatgtgagcgaacaggtcgacgatctcgagtcttgtcttctggcttccggccgaacatacgaatacggagaatgcttcgagatcgaccgatgtcctcgacggtcagacgaaggcggttgtgagacgggtttgaagagtctcgaggtatggttttgtacagtgatactattcgtaaactagctgcggagggcttaaagctattcaagaatgctacacatgcaggtcaccaataaactatatcaattcgctcggtggacattcgaacgttggatcggacaccgtcgctcgctcgacctcgctaaaagtccgaggtcgcgcgaacttggagtctcatatcatcgctcgaggtcacccaatttcaacaactgtcgaacgggatctgatcccatcgccatcgaccatatcatctaattacgagcagtcagtgttgcgtatggctataggggcagtctgtcattccggccggcactgattctacgagcaagacggacatgctctagacttctatcagagagactcgatcgctcggatcgtaacatgaagacgcctcaagacctcctctctcttcgcaagtgggcatatctttttttgggtctctctctctctcgaggtgaggataatctacaacgtcgtctcccgtcttcctctacgggagacgagtatgggcaaggatcgaggtgtaggcaaagggcaagggagggaggtgtgagatcgtccggcccattccggtctaggggacaagggggaaaggacggggcgtctacttgagcctggagatgatggcctcggtgaattgcgaggtggaaccctttccgcccaagtcaccggtgatggccttgccgtcagcaatggtctatcaacgagcgaaagagagcgaaggtcgtagtcagtccagtgtccagcagcactcgtctcacggtacgggatcgctcgtctcgcgtcgggcacggtactcacttcgaagatggcgttctcaatgttatcggcgtgcttgaacaagttcatgtgcctcaacatcatcatcgaactcaacaacagcgccgtggggttggccaacccctttccggcgatatccggtgcggatccgtggacggcctcgaagatggaagcgtcctttccaatgttacccgacggggtcaacccgagcccaccgatcaacccggcgcacatgtccgagaggatatctccgtacaagttgggcatgaccatgacggtatccgcataaggtgcggggtcctggacgaccctgaggcagaccctgtccaacaagtcttcgttgtaaacgacgttggggtagtccttggcgacgttcctgcaggcctcgaggaagagaccgtccgacattcgcatgacggtggccttgtggacggcggtgaccttgttcctgccgtgctccgaggcgtagtggaaggcgtatcgggcgactcgctcagaggcctcgtaggtgatcaacttgatggactggacgacaccggggacgagctatcggaggacggggtgatcgggtcaggctcaagggggacggatacgggtagggacctcgcgcgatcgactcacctcgtgctcgatacccgagtactctccctcggtgttttctctattgagtgccccaagaccacacgatgtcaacactttttttacccctatctcctccctcgtcctccgtcgcgagactcaccggatcaagaccgtgttgacatcatcgtacgccgtcttgtaccccttgatgctcacacaaggcctgacgttggcaaacaacccaaacgtcctcctcaacgtcaagttcatcgagacgtgtccctttccgatcggggtggccaggggtcccttgagcgcgacggtgttcctcttgacggaagcgatggcgtcggcagggatagcggtctttccgttgaccaaggtgggggtcacatcgacttcctcccacacgataggggccttggcagcgctaaagatggatttgacggattcggcaatctcgggaccgataccgtcaccggacatgagggtgacgctgtacttgccctacgagcgtgcgtacgtgcgtgtaagatagcaaaggtgtcagctctgcacggagggaggagggtgaagaggggggtcagagtatctcaccttggaatcgggcttgacggcataggcagaggaaggagcggtcgactggaaagccgagttggccaacctagacgaggtctgtttcggtccgaatcgagtttcgagagcgcgcccgggtcacgaaaaggggtcgtcgagcgaggaagaaaagggaaagcatgaaagagctgaagtgagcacggtgtcgttgagtgattcgggttgcaggtcgagacgagatgcgactcgcctggaactgcctgagggcactggcgatagcgttgggggtaggcttggcgaccatcttgacaggagtttttgttttggagagggtggggggcgacgagcaagagggtatgaacgaggttgatgtgagagttgaagaggttgggtggaagaatgagaagatatagaaagagatgtaagtgtgtatgtgttgtgtgtgtgtgtgtgtgttcgagctggtggtcgctggctgattgttttgtggtttcgactggtcaaacttgagccgattagaaccgaggagccgaccataggagaaggaggaataatagggggaatagggttatatacacgtcatatccatcacttgttgttgttgctcccctaacccctaacccctaagaacgtcgtctgatagattcggtcaagttcaactaagtatatatacgagatcgagagtagtaatagcgagttgagaacaataggcgatccaagaacgatgaagcgaattcggaacaaagagaaccgaatcgcgggtcgagtgtcgaacatccaacaaagagaagttgtcgtttgccgagtcgagagagatgtctttgtttgatgtgatcggttgtcgagctatgaggtctttgttcgatatccgttgatgtcgctattgttctctggtggtggtgatatcaaatatgcattgtgtcgatagtagagagggtgacgagagcgcgcgagccgaagccggtcgcgtaggagccgaatccgcgtcgcttcccgtaacagctcgcttgatacaaaatgaaacacccaatagaggaagggttgttgggaaaatgtgagcggattcgcaaaaattccggcgaagtttcttgtttgcccgattccaatctggcaaagcacgagtgtttcggacacgacccttattcgtgcaagaaatcgaagttgatgatatagacgatggaacgcacgttgtgactgagattttgagattttgtccgcgtgcgctcgtcggaggacggctaggtcatctctcctgaggttaaatcgtagctggagcgttggacttgtgtgaatttgaatcccattctccatcccatcgagtgacatgattttatacgggtgcgtcccgtttctcgcctggcattacacctctgagttaaatctctcgtccagaattttccagtctttacagtcctcaaattccaaattccaactaagcctgactctccatttgccttgagaacaactgcgcactatttgaaatgaaggccctacgtccgaataggggggcgccctagcactaacacctgacattgttggacccggtactacatccgaggttgctgctgtcgtaattccttttaacgggccagtcggcacggcgataagcggagtactccccgcatgcagtcgacacaggagacccgcacgagaagtattgagtgcaagactgatcctggctatcgctgtaacccatctgttgcatgaaccatacttgcccgacgctgttgggaccgactgggcacgacagacttccgccttcgctgaccgacttttcccagctgagaccgaagttgagacctccatttcctttgatgatcccaattaccttgtctaccgtactgaggtcgaagcctgcactgagagaaacagacgttgtacgaccccagttcagcgttcgcgtgcccccttgatcgctgagtccggtgtaggtgcaacccgagacagggttccagggacccggccaaagtccggtcttagcgacctgcgtatgtttgtagccaacgctgtagtatgtacatccaccgttctgcctctttgcaacggtcccgttattgtcaatgtttgcagatatttcagcttgcacggcagcgggcaatgcgctgagcactttgatctcggtgatcgtgtatgcttcatcatcgcggatgatggtgcccccgatcttgagagcggtgtcttttccctcaaacggcaacgtgatggtggagatggaaccaatgactccagcccacaccccagtcatggaaaagacaaagacagcgaagaagatcgcaaaaacgctgaaaccgttgcggcgtgccgacgaattgatgaacctgcacggacccaagtcttcggagtcccgaaggttgtaggccaactgggttgcgttcgagacctggcaccaagcgagatccgtcctgttggtacaactccagttattggtcatggtcccttgttgattgaaacactgggaccacgagaggtcccgagggttcaaaaagcatccggtaccggaaacgcatttgagagcgtcggtggatacgttccaagtggacgttatgtatgagactgtgcgtcgaccgctataaaggtcagttcgaactgttctgtacggtacgtggccactcatacccactgcacaagccaagcgctacaattcaggccgaagaagaggacgatatatgtcctctggcggagacggctggtccgcagacgcaagtatgccatcagcatcaaaacgttgtaagacggcataaaacagatgacttgcaatggccagctttgggaagtatgaagtatatctggtcgatggggaaggcaatttcagcctggtagggaggtacagcttatatgctcgtcttgaggtcggcgcaagcccattctgctcgtccgctgaccacatctcgcccggcatgactatgtgaaacgaacccaacctatccaggcacctatctcgactggttgtcccgactggctagtcgtgatgcggatccttgctaccagcaagtggtgcctgtcgaagccccgcagttggcccgaggagcttccgcgcgctacgggatagcaagatcagcgccaggcacaggcacgatcaggagtctagtcggaataatcccgaccgttaagttcatctcttcgaccaaagagtaaggccatacttggtggtcaaataggaagcatcctttcccctggtcccgcagggacggacttcttgtttcgcttgcggccgttgttgtctagaattgccctacaaagccctacaaagccatcaacagcgactcggaaccatccaagatgctttggctttgagaaagggaggaaggtggccggaagttgctcatccatgtcgacgctgacctgacctggccgccgtcacattacttcgcacgcaaaagtgtcgtgagattgagaggctctgcgttggtctcttcgtaatccgaaccggtatcacccggcacctaaagctttgctacacgtcggagatgacgtggtaattacccagatagtttgatgatcgtgtcgttttgaagatcacggctcaccaagtgacacagatgaaatctccgaaacttcgtagtgtgctgagttcacggtgtagcgacaacgtcaaaacagacttgcggaggaaacggatccggaagaaagttcaacgaattctctggtgaatgtcaaccggacccacttcgcagcatgccattcaatatacctcctggtcgatgcatatggagataacagctcattgtctttcacgggcccttgtattaataattattcacacgttctatcctgggtccagtgagtctggtccgcgggcagcaggaccccgaaggaattccactcacgagacccccttacgtcgcaacctagaccggtgaatcgggcttgggcgggccaaaaggcatctgtgacgatttgggcggccactccgcttcgggctcccaatcgacgtcgtaaactttggttccactaccaatgatttcgtcgattccgggaaggacgacccgtcccgtcgagttgggcgggaccaccacggtcacctcgagcttgctgccactcagaatccacccgcagctgatctcaccgtacggactggtatgtttcacggttgctgatcgcagcgagccacctggccggggcctgaagaggatctctcgccaacccggtgataacggagagagaccgccgacgaccttgtgcagccaagaggcaatgcttccaagagcatagtggttgaaactggggtcggatcggattagttttacgatctgtgccgcaggcggttcaattcgcacgtacctcgtcatctcgcctggattgatcgtgccatccggcagcatgctgtcccaacgttcccactggtcgagaacgcccaaaggacggccagtcagcttcactcgcgcttcagtacgtggcgatctgacacttacgatggtggtcgctcccatgctaacggggtagagaatagacgggaattgcttttcctggaacatcctgtatgcgtgttgcaacagccgattatcgctcagagcatgcaagatgatgggagttccggcaaatccggtagagatttggaagatggccttgcgaacgaggtgatcgagtcgatctcgagcgaccccgacgaccgcctcgggtaataggtgaaagtgcagcgccaatgcgagcgccgtctgggtgtccgacatgagcctaccattttgggtgatatattcccgctggtactcggttttgagcctcgaggcgtcgtcggcgaattgtcttgccccagctccgtcaccgaccagctcggccatctttgacatgacctcggtcgtatgcaccaaccaagcatcagcgacaagcaagttgtcagttcgaccgtcttgtggagcgtccgacggtgctttgggatccaaccaatcgccgaattgaggcaacttctgatcccaaagtcctttggcgttgcgcttgattcccttgttcaaccaggtcgtcatgctatcatactgctgggcgacaatgtcgacatccccagacgccgtatagaggtccttgggtgtcaggacggccacgtcgccccagatggcggatggaggaggtggtccgaaaagcgttccaagagtgtttggaacgacgagtggaacgactccttcccagtcctcaatctgctcagccgcgagatcttgtagccatcctccaatcgtagagctcgtgtcgaatagaaagctggccgtctcagcgaacacttgcaagtcgccggtccaacccagccgttcgtcgcgctgggggcagtcagtaggcaccgaaacgaaattgccacgtagtccccaattgacgttttcccacaacctgttgatgagcggatgatcgcactcgaaccaaccggtcctctccatgtcggtgtggacgacctgtgcggtaatgttgtcgatcgagatgcctctccagccctcaacctgggcgtatcgaaagccaaagaatgtaaagctcggttcgtacccttgcaacgactcggatcccacggtgagtttaaccccagctctggcatgtcgtaggggtcgaacgccgagttcgccctcctccatgacttcggcgtgcctgatttcgacaatgtcgcccttgcggacgctttgcggatgacattcgagcttgagccagccgaccaggttttgaccaaagtcgagcacggtcttgcccgccggggtagtgatgatctgtcgaggtcgtacctcttgcgtcttgcgcacaggagggcactctgcggcaagtaatcgtcctcgaggggagcctaatccacgaacgtctcgctgccagccctcggccgagtctcgctttgtcatccaacctggacgttcgattccgccgtcgtattcttctccgtcatagatctcgctcttgacgatcggaccaaaggcccattcccacccgtcgacatcgccactgctgacctgaacctcgccgtccgtctcgagttgcagcaagacgccgagatcgcttccccagatattgcgtcgaccgccgccaaagttgagtcgagtcgcgaaccacccttcgccgaggaccacgccgatcacgttttcctcttcgtctgctcggagcaactcgcccacgtcgtacgtctggtagtgtaaacgatggtggtagctttgccatcccggtgccagcgcatgatcgcctacttggataccgttgacgtagactttgtagcatccatgggcagtgatatacagtcggtccttgcctgcgtgcttccgttcttgcttccatgccttgcgcaacaagatcggtcgatgaggttcttcttgagactgctcgggcccacttaggagcttggcagtccagtcggaagagtcgagcagggccacctcgatattcaactcagcccattccgtctcgcgaccgtgacccttggcccgcacctggacctcgacggcatctcttgagcagagttccctgcctggccagggcaccaggaccgaatctgacgaggccacgtcgtatctttcggctttatcaccgccgttgtatcgaatcaagtactcgtacgatgtctgtacccagtccttgatatcgccttcaaacctccaagatagcctgggtcgggtatgcctgattcctagaggtatcgggtagtgttcgcaggatagtcgggagattctgagtgacatgattgcgatgtcgagatatgcgggaggtcctcgatattcaagctggcagacgggtcgaattgcgtgaggcagggcgcgcgtctctggttcgaaagacggacgagtggtacgaccttcaaagggtttctgtttctggcttcaacaccgtctcgacgacgaccgctttggacgacctcgtcttctaatatcatcaccgcaatgctcgacccgacctgcccagaaactgtgagtctcccggaacccggacgtaagatcacggcgagcggcatgttgatgaaccgatattgaaccggatcggcgactgcggaaccgaagcaacgacgagtctcagctcaagtctgggtggatcggagaaagtggcgaatgtccactttggccaccttgccaatctaagctacggtggacgcgatggacggtgagaaccaaccactcccatcctgtggacgagacaaggccgggacgacgttcccgcagtatggcacatgtgctcagactgaagctgccagagcccttccttccggcgcagatgtttcgctcggtaattatgccggctcgctatgcgaccccgactcgaaccgtagtcgagcggggttgcatgtccgctcgcaaccatacaagaccgaccacggacagacaaggtgtaaggagctgactgtatgaggggccagctgtatcaaacaagaaccatccgtcaaaacgaattctgaactcactcggaagtgacctgcaccatgtcccactcaatcgctcaccggaaccccatcctcccgggtttcaaccccgacccatcgatcgtctttgtcgacggcgtttactacatcgcgacctcgacctttcaattctttccaggcgtgccgatttaccgctcgacagatctgatcgaatgggagctcgtcggacatgctctcaatcggcgatcacagctggacatgaggacgactgaagggggaggagggatatttgcgccgacactgaggtaccacaagggcaggttctacatgaccacctgttgcgcccatcggatcaggtttggcaccaccgatgtgagccgctccggtagcgttacattgcgattctagttgaaagctgatccgagaccctctttgactcctctgtagcctttcgtgacgccgaggggattctacgtctgggtgtgtctcgctgcgcaattttctcgaggctatagctcacctcgtcgtcgtttccacttcagaccgacgacatcaccaacgatgccgcctggagcgagccgatctactttaacatgctcggcatcgatcaggatgtcagtcgaaagcactgaattgtgtcgagccgtttcaccagccctgacactcgacctcgtctcgcagctctttttcgatgactctaccgacaaggtctacctgtctaccacagcccgaatttatcaacctgaactgcctcgatacgggttcgacacggctccttggatttccgaagtcgatctcgaatcgggtcgaattctgacccgacccaagttactgcgacagtccccgatcggtatcgggatcgccgaagggtcgcacattttcctacgagacggatggtactacctcatcacggccgaaggtgggaccgagactatccatcaacagtgggtgttcaggtcgaaagacggacccatgggaccctgggcgacgggcccgaccgagggagatcgagctgtcaacccgatggtgttcaacggggaggatatcaatgtgcagcaaaccggacacgtcgatctcgttcagggtgccgaaggtcaatggtgggcggtcatgctcggattccgtaaccaaaaagatcccgagaccggtgacaagttgtggagtcagctcgggagggagacattcctctgtcccgtcgagtgggaagacggctggccggtcctgaatgaaagacgcaagatctctacgaccggtattgagggtcttgcactgaaacggttacccaaggacatcgaatggcgagacgttttcacagcaggtgagggcattgttccttttccgtagatcgtcgagtcatcgctcatcccgctcggacgctccccacagacaagctcggcctgggctggtacacggtccgaacgcccaacacccacttttacacgctgaaacccagtgcccctggcctcgtcatccatccctcgccttatcacatccgggacgatgagtcaccctcaatgctcctccgtcgacaagacgcgctggctggggtatgggagacaacggtcaactttgagcccggctgtcagggcgaagaggctggtaccacggtctggtggagcaaatgggcattcgccagcgccggcatccgaggcaagaacggtgatgacaaccaggtccaaagagaaatcgtgttcaagcgattcactttggagaacgatgacatcaaggttcgttgaatgtctgtcggtttgcattgttcgaggctaaacttggttcgcacaggaatccatattccccttctccgaaaagggacccgccactctgcgtatctctgctgaacctaccagctacacccttagtttccgagcgtcggaaggaccttgggtggacttgggcaccatctcgacggccgtcatggtacgccaacgtcccaccgattcgataatgactgggacgcattttggtctgtatgcatttggagccaaccacgagcccgggttttcaccggcgactttcgagtacgcttcgtggaccggagatagggtgagatcgaagactggtattgcgtatcaagatacgttgctgacgtttgctttctttccatttgacatgggtgtaaaaggatgctacgtccgtcccgcagggtgacgcatgaatgccgaacagcgacaatgctttctttacctaaagcttcgagataccggccgggtaactggcgtacttgtatgttgatagattcacaagagaataatgaggttctgaatgatatatgatatacgccaacattcgggatgatgctggctggacatcgcatgactcccgagatccgatcatcgtccttagacctctgccttttatatagggacctttctggccgccaacctcatatagctaccttatcatgaagctaggtgaagcaccttgaaaagacgttggatcagaatatccatcgctgtcttgtaagctggcgcggctcgttatctttcggtaagcgcaagcagtccgccggaggattcgtacggaatcggcgtgaccctgtctattccccatcatgttctgcctctttcgtcaagaccagagcaaaagccgatccaattcgccaagcttgcgtctcgaccaacagcttggctcccttctgtagtatcctccgacgtgtactccggctggggcctatcgcgggtcccaagtattgttcgatctcgtcgagtgcgacaagatggtcttgctcacgttcgtgtgcaggaagatgcttgatatatgcccagatactaagcgctgcggcgaatatggcaaaaggataatgcggagaagacttgttagagactgcaaggatcctgagcaatgccagcgaatgccgaacagcgtgacatgcatcagctgttgcggcccattgctgtagctctggcaccacctccagggcggcttctttgcctcgttctatagccagccagagtgataccggttagccagatcggacagctcccgaacgactaccactcactgccagtagccaaatatagcgagtgtatatagacacacagcgagacgtgtcccagatgatacatgacccgagcagtcgtcatggattgactattgggataagagtcgtagtattccgccttccacatatccagcgcttcttttagccactgtcggatgagtcgatgggcgaaaaattagctacctggcaggtgcgattacgccatacctgttgacttgcctgtttccgaccctcgaatccgtcacgaaggcgctcttcgtcgccgggacgatacagtgggaccgaaagtccagtgctggtgtacgacccgagctgatttcgaaattcgaaaatgtggtgatgaagaccgctcacggtgaccagtgcggcaaacgggttgagctgtcgcaccggcggcaggcggtcctcggccggaacgtagatgggcgtgaggagagtgcagagtctacggacaagttggacgtcagcgacgttgcactgggtcgttgttaaatggtcggctcacacgacattgaaatagggcgacggcgggaggggacttgaaccgagcattgcgctccacgacttggccgatggggccgaaaagtaggcttcatcacatggtaacgcggtggtaaccatgtcaccatggctgtggtatgctgggatgccgagaaaggctggaaagatggtatcgatgaggcagatcgagatgcctagccgtttccgactttctaatgaagcccatagtttccacttgtcctcgagagggcgattgtcacgaatgcacgagcgaactcctgccgaaccgaggaggtctgctcggcgacatagctgatcgaagaggctgtatttttaggcgatgtcgtcgggtcccttacagaactctgactcacgttgatcaacgtcccacgagacgcttcggcaagctcgtacgtccgtttgttgccgatgagcaggccgaccagcatcgtcagcagataaacgtggatgagggaagtactgcgcagctgtcatacatggaattgagcttggtatcagtcaggtaagacaaagcttcgtctggaacatatcgacgctcacattggtagcgtcatgctcgaacaatgcgttcaaagtcttgcgcaagacttcgacgaggtccaccgcgaacgcgcgagcaccggacagctccgaatggcacgctcccacgcagatcagggcggccaagagaagcggcattgactgggaaggatcaaaggtgggcagatgtataatggggaattggggatgaaagttctcaaagtagactgtcgctttcattttagcttcgaagtggattgcaagtcgatacaccgacgactcacgggagatgaaatgattgatcgtgtcgaccgattggggtaaccggaactggctgacatcggttccaggcatggccctggccagggctgagagtgtaacgcacatcgtcagcaaccgagtaagagatcttattgccaagacgcctaccgaaactgttcgagatctttgcgaccgtccgctcatccacccagaatcgcttccatttccgatccgtcgagctcaacgcggctgtactggttatctcgtcgaggtgtttgctcgctcccagaggcattgcccgtgcagctggctgccaattcatcgctatgaatgatggaatcgagcggcgtcaggtctctcgtatgcgcctgcgtgacgttcctcgttgccgctcacgccatcgatcttctgcggtcgcgtctggacccagactatccgcccgactctgcaagcctcgtctcggactacctgtcctcaaatattcggtcccgttccctgcggccggactcctcgcccgactcgccgtgatcgtctcgccccggtgattcaatacgggattgaccgatccctggccctgcaactcgctcaggatgtaattgagcagcgccgggtctacgggactcgtttcaatggtcggtacgtgatctccatctcttcgaaagatggcatcgttggtcatgccggcctgatcgatgaaatcggtaggctcgcccaagatccagtgcattccgtgatctgccgggtcaacagcgatgtactccgttagtatgttgtgacgacgtggccaatcagcggtcagcccccgaaatacttgccccaggccagcatgtcctgattcaaagtgggctgccctagcgcatcccagatcatgttctgttggaggtcgaacccggtcgctgccacgagttggccgctgatcagccatcgcattgccgtgcacactttgtgcaccagcctcgctcactctgcatcggtggatccatagcttgaaacccgttgtcgtacgacagggtctgaccgtcttgtcgatccatcatctcgtcccgcgtatcggaaggcacataaagcatgtccccggagatggtcgtcggggccatcgctccggcttgatacccgttgtccatcgaatgaggtcgaaactcgccgttcggggtcgtggcgacgtctgccaacgctgataaccccatagggttctgtctggaccaccattccagttcagcattctgcttggacattggcgccaagttgggtccgggtgaagccgagtcggtgatccagggtcgatcttccgtggacacccgtcgacgtttagcttggcgttcatcctcatgatcgttggtctcgatagaagcgtcccgatatccggcagtagtccgcgtcgaaccgcttcgctcgtggtttttaggcagtgcaggttccgaagattctcgatcctcctctgctgaacctccaacgtcgtcttcgtccattaccgtgcctccgtccgcgcctgcgctgctccgtttggtctctctacgttcatgcaccttcatgtgacgtttgaagaggtctgatcgtggaaactctttggaacacttgggacatggccagggtttgaccgggttgtctagatcggaccgatgggatcgcccgtgtgagtctttgggcatggggcggatcaatgtatcatgccaaggaggagctgcactcacgattacggacgtgtctcgacaagttttcgatccggctaagtaacaacaacgacttgtcgaatggtcagtaccgtactctgtcactgtctgtccatagactggccgtccacccacctgaatgacttgctgcacacctcgcagatgaaagcgtcggcgttcgggtcagtgcgactcgacgtcgagttggacatcgtgtcagcctgtcgagcgggttctgcggcgggtggcatagttccgaatcgtctacctgacgatgacgctagtatcaaccgttccttggctgcttgcttagtatctgcctgctcggtcaacatcatcatcgacatcgcctattcatcagagtatcgtctgcaagcaagcgaggacttgggttcaactctggtttacgtcgagtccaagctcaagcccgatcctcatatttcgaggtcgtccatgtccaccaactgataaacctgaccacaactgcccttacaattagattcaagctcagatgatcttatcgatggacatctcaattaagcccagtataggtgtgtatggatcgattccaggcaagtagagaacgacaagactccatcatctcgacgtcgagcctgtcatcagagcatcccaaccgccatcgcccagtcctgttcaacgcggacaggacagcaagcgcgatccgcaagccgccaccatcaagcgtgtgagatgatgtaagtgatcgtcacgctccgagagtacattcgaccaaagaccagataatggcgatatcagacgattgaatacaacatggccgcaaagatcacaggagaccgcttgtacaacgacgatatactggcccgattcattttcccgaactaaccgcttagataccggtccatcgaatctcctcgtccactcgcaaagccgacacctgctcgatcaccgcagatgaccttgcgacttgcacctggtgttctcccttttcgacgatccaacactgttcctcggttgaccacaccgcaaacgcacgacgaggtagcctgacgacgatctcttgcgattcgccaggttgcagtgatcgcgtcttgacgaatccttcgagcgtcttgcggacgcgcttgaaggacgagtcagatggacccgaaacgtagacttgtacagtctcacgcccggccacatcgcccgtattgcggatcgtcaccttggcctcgaccacttgatcggaggatagtttgtcggtgatctcgaggtcggcatactcaaacttggtgtaggacaacccgtgaccgaagcctgtcgacggatgcaactcaccagatcaggaagcattcagcaaagcccaaatatctttcgtcgctcacagtaagctggggtcgctgccccttccctctcgtaccccttccatcccatgaacaagccctcctcgtatttgagcttcagatcggcatcgtgagggaaattgccgtaggacgggctgtcttgccaatggcgaggccaggtgtaagaggtctttcccgacgggttgacccggccaaagagaacgtcggcgatggctgcaaatttagggacctcgtcagaaaatgtaggaggcgacttgcgacactacgacgggactcaccgttaccagcttcctgtccaccaaagtgagcgtgaatgatggcgccggctccttgggcgcactcgaggtcaaccgcagcgccactctggttgacaacgacgaccttgcctggcttggcggcgacgacggcgcggaccagttgctcttgctcggcaggcaaggtaatgtcttcccggtcgacgccctccatctcccactctgaagtcgtacccacaaacaagacggccacgtcggctcgcttggcggcctcgacggcttcgtcgatcctcgtctgtcgatcagcgcactcgaccatgccaaagacgatccccgtcgctaccggttcgtggccgacctgctcctgcctgcgagtcacgcatcgaatttcgaacggcttgtcggagcgatcaaagtgatggacgaacgtctgttcaaacgtgtgctggtggaacaagtatcgctggatgtcgacctcgccatcgggcttgaattcaaagacgaccttgccatcgatcttgacctcggcgtaggcggtcgtgatgagcgagagctgatagtcgccagcctttggcacgacgaccgacgcgaccatctcgatctcgaaatcctcattcaacccctcgatccggcgcatgaggaacgcttcgatggcttccttgcgcttttcgacgaggatgggctgacggccagcggcttggcgatcgcccgtgttccacgtcctgaattcaatgtcgctgctgtaacgcttgtccaagcaggggatcaggcggtgggtatggggaccatggatgtgctcgatctgaacgttgctcgagctgtctgtcacggcgtttcggatgccttgcagggggtcgacgatgtaggacggcgagatcaagtgagacataacgcgatcggtcgcaagggagccgatgacggcgatcttatccacctgatccagtcggataggcaggactcccgcttcgttgtccatcaagacgatggcttcggcggcagcccgacggatcaaggcacatcggtcctcagtgtcatcactttcgacttcgggtccgaccgtcctgggggctttgacgcgggccaagaagtctatcactcgacgcaaacaagtgtcgagatccgattcggcgatctgcccagccttgatggcaccgatcaacttgtggcctcgggcggccggaaaaggcatttcgaggtccatccctgcgatgatagattcgacaccattgctgcgcaaaggtggggacatcgatacggtcagtccgagctaaaacatgctagcctcgagactcggcttactaggtgccaaaccagtcgctcatgaccattccattgtatttccattcattcctgaggatatctgtcaggattctcttgttggcactggcggtaaatccgttctaatacgaggaggatgggtggtagatgtcagtaccgaatggacacgatcgctcgacggcttcgttacttacgatactgttgtaagccgacatgatggacgagggattggcctctttgacggcgatttcgaacggtctgaggtaaatttcccgcaagactcggtcgtcgacctgcacgtcgtaatctcggcgagaggtttcggcttcattgcagacgagatgcttgagacacgcttgtccgccgttactttgaacacctggagcgagatttaaatcgtcagctatctgtactgtcggacttggagtaaaaggcctttgcctaccttgcacaaacgcggatccgcacttgccggctaaaacggggtcttcgccatagctttcctggtttctacctcctcggggatcacgatgcaggttgagcgtgggcgcgagtacacaatcgacgctcttcaaacgcatctcgtcggccaatgcggatcccacctcgcgaacgatgtcgaggtcccaagtggatgcaagcgcggtggcattggggaaaacggcggctttgaccccgttgaatacggtgcttcctcggatgtcagtcggtccatccgagactttgactttgtggagagaatgtttcgagactcctccagtcgacgagaatgatgatccggacaagaggaagaccttttctggcaggctcatcgagttgatgatggcttgagcgtttgacccatcgtcgagagcgagcttctttagttgctcgatcgacgaggacacaggttgattcgagacggcgacgggcatggcgaggattgtgttgtgaaggtcttggatttgcgattctacaagggagtgtccctcgatcgtggtcgggcgatgtcaggaaacgagcggccttcttctattgaatcgataggggccatgttgcggagaacccggatccatctacaagatggacaacaatgtcggcgtccacattcattgtccacttggaagggatccacgatacctcgtgacgcgtccatctcgtccatcctgtccaccctgatcccatttcggatcatcggtcgacaagcttctcctcacgcgcccacgttatgccgagaaaggaagtttgatgccctcctcccgtggggcaacgctttgggtatgcgaagactactctttcaaagcggccggtgagaaacgaaatcacatgcgtatgtaatgtcataccgagtcccggtggcggggactcctgccaagtattcgcagcctgcttcgagtgctggacagggagttgaatccgcgagcagagctgccgccgtgacctgagccacccacgactaccccgccgatccaacttcgtcgtccgtccactcaaatctcaatcctctccacaacagcaggggggccactttgtcgatctcgtgcaaaggcatctctcaatattctagtgtcaagccccaattcacgttttggatataacgaccggtggtttcatgtcgttgtagatgacaaaaccggggcaatgtttctgcgtccccacagccagacatagttcgcacaagtcctaaccctaccaaccatgacgaccacccaacaccccgactaccaggaggatgtcaaggacatgcacgacctcaaggagacggttcagcatctcgagatgggagatcgagaggagggtgatatcccgtaccccgaaaccttgaagaacatgcccgaggctccgactgtggagatgctccgtcaggcgttcgagttgcaaaagtccgatgcagcccttcctcgtgagtagatcgttggcaacgaactgccggaaggcattgctcatttcgaaggggtatgactcgtcgcagccgccaaatcgtttgtcaaagaatggcgtctcgtagcaatctgtctgcccttcttgatgtctacgtaagtcttcatcggttacaaatggcagagcaactggctgacttgagtaagattcaccaaccatcaggatcggttgcggctttgataacggatgcaacggcataacgacggcgatgtatgtcactctttgtgattgaaaaggcgctcctctactgaccccatggaaacactacaggcccgccttcctcatcaagttcggaggtttcaacccggtcactcacagcttatctatcgagtgagttcgtttcgacattccgcgtagcagtggagactcgactcacccaccctcgtcactttagctctctctggatctctctttggtacgtgaggatccgtcctgcgcccctgcatatccgctcatctgttctgttgggcattcaggggttccatgacccagatcagtatcgcttttggcgccgctagttgctctttcctcctcgaacgcttcggaccccgtaaaaccaactttgccgccagcgtgttcatcatcccggccatcgccattcaggtgtttgcagtctctcccgggatgcttttggccggaaaggtgagcacctgatctgcggaaagagatcgttctttggtctgagtgggaagctgtgtttaatctagatgcttggtggcttccccaacggaatcttcggtaagtgctcagacctacgttatgacccgcgtcagcgctcaccttgtacgcaactccgtagtcgcctctgctgccaactttgtttccgaggccagcacccagaacctcaggcccatgctgtcgtcgatccaagctttctgtggtcttatcggtgtgactttgggaatcgccactggcttcaagcgaattccttacgttgacagcggtgagtctcgaatcaaagtaccaggctgtcatcgtcgcctggacttaatatattcgctacagattggctctcctggcgattggtctttgctatccagtaagacgatcgctgcggatgcgtatctttcttcccagctgacatagctctgacagatgggtattcccgctcttcaccgtctgtggtctcctattcgttcccacctcgcccgtctttctggtcaagatcggcaagcccgccgaggccagaaaggccatctctcgtctgttcggaaccaccgatgaggccatcctctcggcacggatggctctgattcagcacaccgtcgctatggagcagcacgaacagagtaccttgggcaaggcaaccatgatggatctctttaggaacaaggtcgacaggaagcgaacgtgagcatcgatcaccacatgcatggtctgcggtcacctcggctaaagcacgtcttcctgatcagtcttttgaccgtcggtgtctggacctgtttcaacatggctggagcggcattcctcgggtccggcttgtactttttgcagcaacaggtaagcaatcgacgaacacgtctccttgtagctcgtgatctgaccgaagttttcgagcgcagggtctcgacatcatcctcgccacccagatcaccttgggtatgctggcgctcaggtgagtcccgccttgatagcacgcgcgtatgacgtcggacggccaactcaacgcgttcgcacctccttctacatagtggcttcaccaactttttggtcggttactgtttaaccaagttcggtcgtcgatggtgctttgtctacgccaagtaagtgtccacaccctttgcaaccggcattgtcgttgatgcgcgcttatcacgtgcccacgttccattcacagcgctttccactgtgtcactatgctttgtctcggtctattgggtttcgctaaaagcaaggctgccggttgggtgagtcagaggttacggatcttttcgaagactttggcgtctgagattgacacgaggctcccttcaggcggtcgcggtcgttttgaactttgctatttgcacggcccagttgtcaaccggaggggcatcctttgcgctcaactcggagctatcctcacttcgactccgagccaagactcagtcgtttggctttgtaagttgcttacggattccatggaactatcggctttagctgatcccgcacaacgcagttcatttcctactttttggcttgtaagtcgcatccctttggcgtaccgacatcgcaatcgctcctgtcgatcaatgcaaatcgctaaccccttgccaaccaaaaatccagggttgacgagttttgtcacgccctatatcttccaggtgagtccaatttacaatgtgtaaatggaatcagcgactgactcgttgccggatttatctattgtctacggcagtctccgggctatttgggagccaagactgcacgtgagttttctcggtcacactttgctacgatgccgatacggttcctgatccctttttcctgcggtctcgtagtcatctacgcggctttgaccggccttggcgtcgtttgggcattcttctatatccccgagaccaacggtcgaagtgagtcttgcgctttccgaaccacccgagatggatacagtcctgacgactcactcgcgccacagccgctcaagagatcgatctcatgtttgtacacggtgttcccgctcgcaagtggaagaactttgacagcaagacgttgtttgccggtgcggaggagtaagagatgtccttttgtctcgaacccgacagtaccaagcgtgcggtagtgccgcttttcagtcggtcaatttgattgtatgctttcgtcgtgacgatttcgtccaagaatatcaatgtattgtgaagacaaccactcccttggcctacactattcttgtcgctgcccaaaacgattgtcaggttgccgtggccgccaataccaccgaactcgataatcagaccgtggaacttaaaaatcttaggggttagatgacctcgaattcgttctttcaagtggagacacttgaagcccagattcgttctccagcctcgggagtccatgatagtaacgtcggtcatgttgagctcgtgagactgttcgaggtagagggcgaataaagtgtctcgtctcaacttctaggtcgcaccaagcgcgcgtgcatcttcaaagtggaggccgagtcgaggcacatccatctcaagaggagcgagcgatcaagatactctattatcagtcttgcttcaggtcaaccatgcaacattacgtccacacaaagcacacgactcgctctaaagatagcatgctcgagatataatccagatgtttaggtctgcctgatgagccggtcggaactttgaaccaacactttggacacggttgacaactcgggacgcgacatcatcaacaacctcggacaacctcctccagcatggctgctcctcgaattgtcatcggatcgagggtcaacgttaccaatggagaaggagtggtacgatggttaggaacgaatcccgagtttgcggcgggaagctgggtcggggtcgaactgtgcgttggcgtcgggtcccaacgagacgagacggggatcggcgggtccaggcatgatttgctaatagcggctctttcccgtggagcatagtaacgaacccaccggcaaaaacgatggatcagtcaagggaaagtcgtactttgaatgtcagccgttctacggagtcttcgtgaggcctggttcgatcaaggtgattgacggcagcgagcagctagcgagttcaagcgtgagtccaggtcgtgccattccgacggtttcgtattagctgaaggttctaattctgacaccgactacagtctcgacctcagtcgtcgctttctcaggctggtatactgtccggtgccgtctcagctgctcgccgaccttcgtcgtcccagactttctctccatctcgaccctccagcactaccagcaacgtccctccgaaccctctgcaacaaaagctctctcgcgcagcggccggtctctctgcctcgtcttccgctcgagacctagctgggttggccggtacatcacgtcgaacgaacacccgtccggctcctaccgaacgtcgagctgcttcgcctaccccgtcgccaagctcgacaccgacccctgcgcctagacccatcgtcacttcgcgtggatctcggccgccctcgacgctgagccagacgaccgcagccggtctccctcgaccgtctgctatcagtaccgggcaagcacctaaccgtccaacctcatccgcctcgacccattctcgctccagccgaccttcatctgtcgcttcccacacccagctcgagaacatccgcccgtcctcgcgttcgtccaccttggaacaggacctgcacggccggagttcagcagcatccgtacgcaccgtggacgatgcagaaccgatagaggaactccaagcgactcccaaagccgccatcgagcctcgtcgattcggtcgaggtctggcacagaacctcgttgcgactcgaccgtccagcacgtatgaacccggggaatccagccgagaggcagtcggatcgggtcaacatccggccgacgttttccgggcagcgcgtacattgagggctgcgacttccgctgctgaccctttgaagcacggcacgcatcagagtggtacgacgctcgaggtaccagatgctcctggcgccgaccgagagggatccagggtgttcatccgcgaactcgaggagatgagggccaagatccgtaaacacgagagtaaacgagccgaggacgccgatcggatcaagtccttggaagctcgagcgctcgagacggaaggcctggctcagaacacgcagaaactcaagggtacgcggaggtgtcacccaccgaccgaatcgagcttttggactgatcgctgattcttccctcttcgttgtccgcacgcagcgcggttcctcgagattcagcaagacctttcgactcaacgtaaactctacaaagctctagaaaaggagagggacgagtttatagcccaacgagaagccgagggagaccttcgcgaggcgatcgaggcgaccttgttggacaaagacatcgcagacgagaggatcaacgagttggagggccaagtgtctgatttgaccacgcggctcgaagaggtggagttggaaaaggacatcttcaaggaagaaaacggtcagcgcacagagtcgagaaattgaccgttcgatacgctcgagactgacccgatcgcacgacctgaccgtagccaagaacgaaaaacccgtcgaacccggtcaagaacgatcgtcggtcgtcttcatccagctggagagacagaacgagcgactccgtgaaggcttgatgaggtgagttcggtgggatcgtcttgctcgatcgtagcgtcgcatgcgggcatccggactgacggttgatccactctgacaggctgcgggacgtttcgagcgatacggaaaagatgctcaagtcgaggatcgtcgaattggaaaaggagacgaacggaagcgaaggactccgaggttagtcccgtgaagggcaggctcctgcctcgctagcccttactaaaaactaacaacgttatgatagacgagctggacaaggcccgccacgaaatcgagaaggccgagagtcagatcgaggaactcaagcaacagctcgacgtggcattgagcgccgaagacatgctggaacagttgaccgagcgaacgctcaacatgggcgaggtcagtacatggatcatacgcttgtcaacagatccaagccgactgacacggctttacaaatgacagaaaattgaagagatgcggattcatattgaagatctggaggcaatcaaggaaatgaacgacgagatggaagagggccacattgaaaccgaaagacacctgcaggaaaccatcggtgagcttgcgaacatggggatcctatccggcgcatcgctgagacctcgccatacagacgccctggcggccgatcttcgagaacagaaagaccgagaaggcgagctagaaaccttggtcgccgatcgagaaggcaccattctgcagtttcgtgatttagtgcaagggctgcaagggtgggtcaaagatcggtgtcttgttgcttctaaacgctagaagactgaccttgcgggcgcggtctgtagcgagctcaatgacctccgcgccaagcatcacgagaccgaggcggaaacagcaaacctttcgagccaatcgcaagcgatgctgaacatgaacctcaagctacaaaactcggctagtaaaacgcaggcacgagctctcgacctcgcgttggcaaagatcgaagcgaaggttgcaaaagaacagaccgagatcattcaggtaagccaaaggcatctgcgcgatcaatggatcgaatgccaaccgctgtttgcgctacaggcatacctgcccgctagctattacgagtccgatagcgaggcgaccaatgcggtcctcttggttcaccggctcgctggcaaggcagacatcttggtctctaccttttgccagatgcacaatctgccagacgccctcatcgacgtcaacaacgatcgacttcccggtgtatgcgaagtacgaggtttgatcaccgtctttgccaacttcttagctaggctcgctgggagcatgatgagaggtccccctcaagaattcttggccctggctaggttgaatatggactttgccccaattgaagagaaggtcgatcattggttcactctcattcgaaagaatgaattcaacgagcgagattgttctctcgaactggcagggtgagtcgacttgatcgagactagatttgtcgatgctgaataggccgtctcttgctagatacgtaggtcaactggaacgagctctcggctctatcacgagcggagtcgagctggacgttgcggaacgacagctcgggctggccctggcgttcgactatgaactcgacaattttgctgcctcggtcggactggcgcggtatggtatcctggaaatggtcaaggacgcgggtacgcttgacagattaccttctcttcgaatttgctgcgctcatggtatttatacagacgcactggttgaggatccggtcacgacgatcgaacaggagattttcgagccggtccagagaattttgaaccaggtccgcgcagtcaagctcaattcgatgtgagtcattccggtcgtgattttcagcgaatcttcgactcatcatgacaccgcgtcttcagtaaattggtcgatctggtccgccgcgtatccgatcaatctactgctctagaacatgatctgcatacgccggtgcgcatgatttcggaatccgtatcccgggcaacagatgttgcggttcaggtgcgttgctcgatttgcttttgttagagcataaccttattcttgttgaatgtttacagctcgcccaaaagattggcggtcacctcaacgatctccgtggaagtcaagaacctctgagactctctgtgatcttgcaattcctacaagaagtcacgtcggcgatcaatcctgagggcgatataaagccctgggatatcattggcatgtttgtcacccgactgggcaccgatttgaacagcttgcttccacgaatacaaaccgcggtcgaggaggggaatctgattcagagtgggtgcaagctcgtttgtgactagaggggctcggtctgatgcctgacctgtgtcgcagctgggttcgccggaccgtgggtcttgcgtgcggatacgcttagggcagacctcgcatcgaacgcagaggcagagactcgagtggctagtcaagctgagcagatcacttcgttattgcgcgaggtcaagacgcgggtaagatggcatgtccgagaaccatagttgatggtagcttactattgtcggcccgctcaggatcaaatgctagaggaaacacaagtcaaggtcgagctcatggaacgccgcttggagattagcaagaagaatgtaagggtcttttgcttggacaccccgtcgaagtcaagctaacggttgatacggcaggctgaagacttgcacgaacttgaagtcgaactgcgggaggctactgagcgggcgagtggagcgcgcaatcaggtccaggctcttgaatccgagctatcgaaactggagactgaaaacgctcagctgaggcaattgacggcgtccgatgcggcaggtgagtcgaagagagtccagctagcaacctccgtcactcatctcttttccgcgccagccgaaggtgcaagatcgagacgagccggtggtacggcgaacggtctaaatgagcaacacgctagccatctggctgccgaggtgagagctgtcgtttggatcgaaggtatccatcgactgacccatatgaaattgcaggtggccaatctgaaggcggctatcgacattgttcgtcgagaaaacacgctgctgaaagcagagggccttcttggcgaggtcaggtcgcttcccgcgctttcccatgcgatggacccggttccagcactggatctcaacgaggtcacgggtggagcttcttcagattcggacgcggcccccaagactccacgagcttcaatcttcaagcggcccacgactgtgcaaaagaaccacctctgggtcggactggccacggcacaggcaagtgcaagcgtcatcgatctcactcaagtcaagccgggtcggggttggcagcctctcagacgtctgccagaggtccagtggtcggaaaagctgcgcgcagaggaaaaaatggtgaagagtctcaaggcgttcgtggaatgatgcggtctccacgagttctcggggcctcgtcttggctctctttgttgtactccccttacgaacctttgacgaccgtctgtttgcgttcacgaccggccatgatcattgcatgttcttgcgagggtgtcgctatctatgcgagtacaactgggaccacatccatcacacgtcgtgaccgtcataagggcctgcccaaggccaacgaatctgggacgtttgaccgcggaggtggcacgaccgatctcatcgagacgggactatcgtgcagacgcggttgcgcatcttcggccctgaccagctcggtcgatttccgtctctctcctgatattttgtgactgtcgggaatgtgaatggcggggatgttgggccgcctagatccgagtgacgagtcgacccttgacctgtcctccgagggcgtcgagcgattcgatgatgaccgctccatccgccttggctcgagtgatttcatctcggaaggttgattacggggtaatgtcggcggtggagtcggcgatagatgaggactcgtatggtaagatccctgatcttttctcggtgtctgtctggctggtgcgagaccttgttccgggtaaacttgtttcgcctgtcgatcgctcggcagggaccacatggacgagcttggcgatttggcttctggtgttgtcagctggaactgaggcggcgtggatggcccagagggtgacccgaccctattcctccctcccgcctcgtcgctaaagacggtgacgaaggaccccttgttggcaagcgtcctgaaatagcccgtcgatcccggtcccaaacccgcccccgagttcgaattcgacctcgagtcttgcccagaggtaccttgcatacgtctcactctcctcgcctcgctagcctctcgcatggcgagcgcgaattccctcgagagcgtcgtcgaaaaggcataatcgagcgcggtaaaggcgtcgttattgcgtgaagaagctggagcaccgaattcgagcaagacctttatgcttcctaggttgttccatgccgaggcgctgtcgtggtatcataacggtatcagctcgagtcgatcgggtggctaaggggggcctgagcgactcactaatgcaagggagaattgccttgcaaatcagtcagttgcagatccgccccgagctcgcacagcgtctgcactccgggtcagatcagatcagattcacggtattggcccatattatacgctccgaggactcaccctgaccaactctgtattcccactctggcaagccatgtgtaacgccgtcttccccgccgcattggaccagtcgatcagatcggggactagatcgaacgaccggaaaccggacctttcgctcagctcgtcgcccataccgctggctgagatctccgactcacagacatcccagtacatgttactcattcttacggccgcttggaacgtttccatctttttcctctctgtggccgagccgggcgtgtcgggcgatgggagcgaagcgaggaggtgtaggatggtactgttctccgaatcctgtacagccgtcaaagcacgaaggagcacggtagcgatatcagtaacaacgtgttgaaaaccggagcaagtcgacgactcaccctgctcagctcgtcatcgtcatgtccggcatcgagcaacaaccattcatacacgtcctctgcgacgctcaacgctgcccatgcgagacttgtcaatcgtctctcgtccgtgttcctcaggtccgtcttgtatcttaatctcgtgaccaggttgagatcgttttctggcgagacagaaatctcgagaccgtcagctactgcgtggttgatactaagaaggatcattctggggtcctgttgatggctcactctggacagcttggcgtagtcgcaacgacgggttgcgtgccatcaatgccatttcagcgaggtccctcagaggatagacatttgtatcccgacagaaccccttctcttaggggtcagcgattgagtcgtttgtgatcgatggtatcgatagaaagagtcaagttgcatatcgtcgtttggttgttcacatattcctaaactcggagttgcccgacaaagggacgacgaggtggccgagacttggggaaaaggtagaaaaaggggtctgttatcctcgaacaaacactctaccaacgatctacttggctactactacatctagatctatcaaggtatcaaaggtctcactacacactcgagctgatgacaaggatcgcacggatcgaacctctgtaaaagagcgatcgaaaggataacaagccatcaactatcgagtcaaacgaacctcggacctgctccagcgacattcatgcaagatgaggcaacaatcgccccgctaccatcattactgtcttcgagtatccctgatacctattggactcatactctccttttgcgtgctattgactacgctcgacctgctcggcacgcccgtcaacccggcgaggaatcagcatttaggatggcagagctgggacgtcgtcaggtatcccaaagcggttaaacccggtcaacaggtcgtctctcctggatctctcactggatccaagcccggtgacgattccaacgagacgtccgacctgtttgacggcgacgacgacgattcgacctcaatcgctccgagcttgccattggacaactgggacccgttactcccccacgctacgggaataagcgagatcacggtcatgccatgcttcttcccaccctggatctatcctcgactctgtagccctccgactactccagagcaggacaagctcaagggacgttgggtccgggttgagagggatctgaacgtcaagtcgggcttgtggtacctcgtaagctcgataccatcccccctcccttgcccatgatctcctgttgacctagcccggaaacggccaacctgtccatcatcagaacatttactaccgccggacccgccgattcgatgtccccctgatcaacgacatcgtactcctgcctgaaggcgcctccccgcccggccatatcaacctctcgaggtatacgatggccgttggggatttccgggacggggtctggccgaaacaggacaagttgcgattgtggtacaagactcgggcgggtaatcgaccgggtttgtcgtccgtcggaggacaaagaggcgcgcattacaagagtcatcgagagtggtctcagtgggatactgatctcgaagaggaggaggaggaggcggcagaagggtcggaccgagtcggtagcagcaagtccacgatgaacggcatcgggacaggtggagatcacgacgagatcatcaccgagatcgacgtcctctatggcgaaaaccggccgttctggagtttcgagagggtcaagaacggaccggtcgtcgaacgcaagccgaacaagtgggagatggtcgatgtcgtcgtcaggagaggtaatccgggtgagtcctccgcacccgaatgggtctggggaaagtatacagccgacacgtgttcctatggctcatgcgaggtattcactcgacctagtcaccccgctcgccacgcctcctcggtttagtaaggaaggcaaattcaagatcatgcagattcccgacctgcacttctcggtgtcgcacggggaatgccgggatacgctcaaatctccctgcgtcggggataccgatacgatcgacctgttgagcaagatgctggacgaggagaaacccgacatggtcgtctttacgggagaccagctgaacggacaggataccagttgggatgccaagagcgtcatcgcgaaggttactggaccgatcatcgatcgcaaaattccctggacggccatctttggtgagtcatcgggtggtcggtagactcgaatcagatgcgggtcggtgactgatctgagcgggaatgatagggaaccatgattccgagatcctcgacgaccgagccgcccagatgaagtatatgcaagcgttgccgtattcgttggcagagccaggtccggcagacgttgatggtgtagggaattgtgagctgcttcgtccacctatatctcgaaacgcccacttggcgctgaccccgttttatgtgatcgccagatatcgtcaaactatattcgcatgacgcgtaggtactgagccggcagtgaaaaggggctgatctcggctcagcatgtttacaaaacgacaggtccatgatgcacctattcacgctctactttttggattcacacgctcgacagaagcgcaagcttccctgggtgtggacggattacgactatctgaagccgaaccagatcgaatggttcctcaatacgagctctgctatcaaacccgtcgaacggccgttcacgtcggacggggacgacgacctcggcaaggtttggacgaggcgtacccacggtggtggcaagacgcggtaccacgaacgggcgcaggaaaagatcctcgcgaaaccgaacgcgatgatgtttttccacatcccgttgatcgagagttacgagccgatcgacgtggacgaggagacgggcgaggagatcgatgtcggggtacagctcggcggggatggcccggggagtagcaagacgaatggacgtttcttcgagtttggtttactccaggctccatctgtgcctccagagatcaaggacgtcgatgtttcgtcgaccctggcggaccagcacgaagtcaaggttgtcgcgcatgggcattgccatagtgagttgtgggcgaggcgaatcgccctgatactgtgacgtctgacgtgtgctgttccctttgcaagacacggaccactgtcgaagaaaccaagggattcacttttgcttttctggcggtgtgagctacgatgcctatggcagggaagggttcgatcgccggactcggttctacgagctgtacgattatggcgagacgatctcgactttcaagcgaaccgagcacgacgagaatgtcgacaagcaactcttggtcagcggaggtgtggccatgagtctgaaactcctcgattgatccgccgagtcgagtcggctttccgcaggtggacctttttgatattgatggaaagactctgttgtacctggaatcgtaccgtagattggccgatatatcaaggccccatacccagactgagcatgagcatgccgatagatgaccagagtcaggtcattgcgactcttgtcaaccagatggtcgtcgaacgttttcaacctgaaactcgaaggattttcttggatttccccctttttttccgaaaaagtcaacaactcaaaaactttaaaaaggttcaaattcgatttcaacaagtcgttcaaagtcgttcaagctgcaagttgaaaggtaatctcgtcgaaaatcataccttgagatctgtcattagcagaacctgataggtctagatcaagatgttgaggtcaatatgtcaacggtgttgtcagtcgaccactgcgacaaacggcactcgatggttgtcgagcagtaccacgctcgaaaagggtggaccccataccggtcaacgcaaaccgatgacaagtcgtcgaccgggtacatcgacgaccacgtccacaccttcatggaaggaatcattcgagggaaagagatatcctcctggcaaatatcagtctagggacaagcctttcgcttcaacgggaagacgcgatgagcgaccggcagaagcatcttcgaggggagatcgtccaccataccggggttcatcagaacggtcgtcccggctcccgttgcgagattctcgaggacctgtggagcctacgaccagtcgacgtctagcacgagatctcgtgccaccatcatcgccggcatcgagttcgaaaaagggctcgacaggcaagcgagaagtgccggccaaacttgacccctcgttccctcccaacctgcaacctaccccatccacgttcatcgccaaatcactacccaaggaattcatacctacctcgccattttccgagtattctctcaatcccactctcaaagacggtctgagcaagtttttcgcctcgccccaggatcccgcggcggagccacctcttcccactccgatccagcacctctccctgcaacactttgtcggtagtaaaaatcgaccactgaacaggaagccgggaaggagggaacatcatcaggtcttgttgggctcggacacggggtcgggcaagacgctggcgtacttgttaccgctgctccacgccttgaagcggacggacaaggggatcgcacttgcaccatcaggtggtcagggcaagggaggagaactaccctacgtcgattttctggacgacgtccccggatcatcaaattcggcgtcatcgggcgaggtcaaatccgagacgatcgacaacccgaccatcccccgctccctcatcatctcgcccacccatgaactcacccgacaactcacccggacggcaaagtcgttttcccacgggatcaagctgagcgtacagggcatgtcatccacggcgagcgggacgttgaaaccgggggtgacggacgtcctggtcgggacggtgaggaacctcgagcgtctggtggacaagggcgtggtggacctcgggcaggtcgagtgggtcgtcgtggacgaggcggacgtcttgttggggccggatttcgagtccgagacgaggaagatcttggaccgggtcggtatcgtcagatccgatgctatagaggaggaggagcatgagcaaggcgaaacaaaggaaggacaagaggagacgaccgtggaacaggatgcgggaacggactcggacaaggtcacgccatccttgattctctcgaccgcgacgatcccgccttccctaatcgcccacatcaagaaccacctacctggatgtcaaaagctcttgtcacctacgctccatcgtctgccgaccaagctcgagacccggttcgtaccctggtccggctcgggtaacaagctcgccgatgtcgtacacgagctgaggaggacctttgcggccgacgggatggaaaggcgtcaactcggtgacaatgctagcgaggaaaagagcaagatcttgatctttgccaactcgcctcgcaaggtcaaggcgctcgaaaggatgttggagaacaaggacgtgcccgtgctcgccatcacgggcgaggcggacgatcgagtcaggggcacgaacggaaggttggacgactttttgctccagcccggtggtcggccggtgccacctagacgagcgggttcggcagggtcggacaaggcggcgagagtcttgatcacgacatcgttgctgagtcgagggttggactttgcgccttccgtcaagcacgtcttcttgctggacgagcctagggatattctcgatttcatgcaccgagcgggaaggaccggacgggcggggagagtcggacaggtcaccgtgtttggatcgagcggcggtgggggtggcaagggaatgtttggacgaaacagcgacgaagctcgacgaaagggtatgaagcagtggcaacgtgggaccaagctcgggaaggagttgaagcaggtcatgaccaaggagtaggcggcaattcgacgccttttgacacttttgtatggtacaacactcgattcggcttcctgtccggtccatgataccctttcggaaaccccactttgcatctatgacatctcgctccgagcgcggagatttgtcggatttgtctgtcgaggaaatatattcccacgtcagtccctttcggatgacctcctgtttcggcgactccggcgttccctctctgcgatcgattcttcaactggaatcggtttgtactggcagggccggtcatggcgagcgcattcctcacacggctgatcccccgagcattttatctttctatctatgcggatgggagattagctctgcgcacacctccgagataccactccagtccccaaagacgggactcgcctttttcggcatatgatgcacgccatgcccattctggtcgactttaccgatttgccggtagacacaactcgtctgcttgacgactctgcgtcgcttcgaccctctggcacgaaagtctctaggacgcttggtcgatgcgcattgcctccaaatactaatgacatctgtagtgggtcatcggtttcgctgcccagagtcatcgtgcggcgcgatggagcgactcctctcggccgataaggcgccaaggcgtgcaggcgatattctgcactcgctcgacgacggtgctcggacaaggtctgggtatcggtcaggttcgagaacgacatcgaggccgtgcccctgagacgcccttgagtttgcgaggaccccgtcgtgtacggtctggcagggtttgacgatgacagcccgggtacatggctcgatccgcggcgacgataaggcgtccctaaagtgggtcggcctccaggccccggtgagcttgtcggtctaggtcgttccgcgtccgaaggtacaaagccgctcgtaataccgattcccgttgtcaagggagctatatctttggtcccgtgtgtagagagaggtgacggcctgcaggccctcacttcctgtccgacgaccgggaatgaaggaagcctactcgaaaagatgtcggaacctatcgtggctctgcgctcgaatgatggcgcatgtggcgctcggggagggggcaagatgcgtctttcgaacagcgatcctgtggattgcagtggcaagaacggtctcggtggggatgttggctgggaattttcgctcgataccggcggggaaattggtacgagaggaccttgtcttgcgttgaccgtgaggacagattcggtattttggcgcagcgcggcaccgaccaatccgtaatcttgaggtggcgggacgactgtgaaattcgtcttcgaggctagaaaagtatcgagcggtgatatcagaaggtgatctccctaaagactatatgatgtacgtacgtaatcctggcatctggatcactccacccgacccggaatgtacgatatcgccctcctgcatcgaaacgtcctctccgtccgcatcctcacacgtcaatgcatgaatgggcaaagcaggactccatgccatctccgtactatgctctattggcggctgctcctggccagggtgtgcgtgactgttgacctggacgtacgttgatatcgagcgtgtcactggcgtttcgtctgaagccgcaatcgctcctagcgccggatctgccgacccttcatgcggggtcgttttatcgtccatttcgaactctgctgctactccaaattcctcttttgtagaagcaccgccgtattgtagatgtctgaaaactgggaaggacatggtatcggtatgctgcctcaaaggaggctgatgagcggggtcacccggcgcaaatcgagcgtaaggggtatcctggaggtcggtggatgaatcggaaatgtaggccactggtttaagcggagtttcgggacaagaagacgagtcggctccggcaagggtcttttgtatgggtatgtgcggactgatgggtggatgtgtgttcgcctctaccttgtgattgtcgagatcgaccggtgacgtcgaatctctagtccggttgccgccggagctctcgcccgtcgaagccgatgttttcaagcgagagttccgtgattgtcgtctggatgactgactgtgaggtctagtggttggtaaatgtgaagatcggtcgtaaaggacgcttgcttgacctgtggtgtcgtggcggtcgaagcagtagacaaggacgagagattcagcaagcagttttgtaacgaattaaagcctaggtcaagaaatgtgatctggggtgcgaaagcttttgatgatgagatgtacatagcccatagtcatcttcgcgatgttgggatatcgtcttgctcgataagcatcacggtgactaaaagagcgtgatgtatgtatttgctcgttgtgtttccgtgtttggcaacaccggcggcacttacagcaccgcccaagcagagtctcgtcccgagttgatgcccctgatctactcgatcggagatggcaggatcaaaatgcccgtactcgaccgtcgccctcggtcatcgacgtcgttcgtttgggtgggtaaacgagcgttttccgcatcgtcgagaccatgtggaacctcctgaactgcccgtcagggtcaacacctccgctgggaacggagtgggcctcggcagatggattcaccagagctaatgagtatttacagaggtcaaagtacgaggtggtttggtactccgtgacagtacggaatgatctcgaaacgctcgacctcatattctgatggaaacccatgtcgggatcggcagctcaccttttgtcgattcgctaggggcgaccgacttgttcatcctatccgcagtgtcatcttcgtcgtcgtcttgatcctgggtgagaggcaggtaacgatgatggggtcgatggtactgtgatgacaacgatgggtgatggtgcaacattatatccaagtcaaaacgcgaggccaagaggtagatggatcagacgatgacgatctgcgacgtccagtatgtatgaagatacaacgacgccggactgatctagttatacagtcattggcgatacgcttgccgtcatcatatagtcccggacccgtataaaggaatcttccctctgttcttgtacccatgtttcaggtatcatctacaccttcttgcccatcacctacgcaaggccgtgcatatgtgttatccttgagttgctagacgcatcgatgaagatcacgggaccagtcgacccctcccttgggttcgcccgaagcccaaattcaaaggtcgagaagtaatttggcccctcccgttcgacgaagtctgacgccctcctttcgccgttgttggagcattacgggcagacagagtcggtcggccgacgagtcagcatgcaggtaggtccgagtgtcggatggcaggaagggaagacgtagtttatggcaaatcaatgactggccagggaatgagtgtcgtcaagatttgaatctcgagacccgaatgggagttgaacttcaccagtacagatggtgcgggagagaggtgatccaggacagtggaccggaagtatgtgcccatgcttggcgtaacgagactaggacggggacgtggtacagtaaagttgtcttctaccacgacggcatactacgcgggtcaccaagtctattcaaaccgcgccgacaggccgactaggatcaccgtaatcttcgcaatctgtcacacgatcgggatacacaaagaaactcttgaatccggctccgaggcggacccgtcgatctggccgatgagatctgttcatgcgcgaagtatggagaaagggataaagatatctggttggtaaggctagatgaagagtgatggtgatggcgacaggtgcggctgggaaaggagtagacgtacgggaatgttgtttcggatcgctcaataccacgtcagcgagatggcggtcgcggatccagaatggagtgacttatccgttggtgattgtgtcttgatcggtatgtatgaggtaaaggtcgtccacgtcccaaaggctagaacgtagaaccgacggcagaaaggagggtcgaggtggggatatcgagatgttgttgacctataacgcgatcggcgttcgatacgaggaggctggaggtatgtcatcgatatggataatggcagaaagtagagccggaccgtcgattattagcgaccttggggttcgactggatcgtatcgttcatagttgagctcaccttttggcgggtcagcgcctacgttccagaccatccaattctgagagagggcgactcttatgcgggtgttttgtaagccctgccgcgtaaattcgatccagagcgcccgtagttgggcgtatcggttactgggtagcccctggcagcgtaggccaggcgtttctatgctcctatcattataagaatgactagacagcctgaacacccggaaaaatcaagattttgtggtttagcaataggacaaggcgcgagggtgattgaaacaaaatttcgaacggtatttaagcagtgtgcgagtcatcgctgaccgatatcaaagctactcattgatttccaatctcgagatagaagtgattgcatcatcgtcaaatctggctcaaggaagtagagcaggtgttgtttgcctcacatttcttgaccatcctatgcatggtttaatcgtttcatccgttacagcgagcttccacttaatccgctttccttggcttctctgatgacaggtcccggtcggataagccgagacagcaatcgaaggggaaaaaagtgataaataataaaggtcaaatcgcctctcgaccccttcgccctcctacttccgcctgccacagctggtccgatccgagccatcgagggtggtattcacgctgacgaggatgcccgatccggccggaacaacgctacgcaaccgattgatggcgagagcaaaagccacctcgggctaggaccacgcgagaaagggagtttcaagttgaaacacgatcgagctgggcgcgcgggaggacgccgacacggggaagagatggaacgattcagggtgatcaagggggtgaggtggatatgacgatcggaaacagtccggaaagatagagtttatgatgggcaatcgtaacatgactatcccggtggctatcgatttgcactttcacagacgaccgatgattcgttcccccttggcaagggtgcgggttctcgattctggcacatcgaccgactcatcacaggcggaagtttgggagggcagcggttctggtgctggccggcatagcacctcttgctcgtcatccagctgcctgtctattgccgcatcgagctcgagattcttcctgccgtcttctgtgcagtcacggcatcacctctcggtctcagctctcgttgacccctctttcggcttttttccatggcttgatccttcttctgattattgagcccggcctggacctcatcgaggctttccgctgtgacatgatcgacgccgagactctgcttacgcctgcagcacagcttgtggaaaacacgatggctctgcttccttcacgatcctcgatacaccagttccccgttggcagcggtaccccagcctcgtgattcaccaatcaaacggaggtcaacatcctccgatgcggatcgatcatgccgatatcaagtagggacgtcccgctgatctgggaaggtattgtgtcgacgaacggattcgtcgatcttttggcacagtcgatccaggcttcggacacgactgtagtgctatctacagcattgcgaaattaatcaccaaaataggctatagcccgtctggatcaacgtctgctgaatgaaagattaatgatttggagaacgcgtaggtgttcgacgtgtgccgctcgaccatgttgcaacgctcggcgagcgttgggatgtgtctgttattgatgtgtatcgcatgatgccgtctacaaccatcttgtggacgcccgtggccgacccacatcaagccttctttctgggttggatctttagagaaaagtcgacgtgttgtacgctctaccgtgtcgatttcgaaaacagccaggatcagcgaaagcgccaacgagccggaagaccaggctgagacttgcctgatgaatggccgatgtggacaggatgtcgatatctgtgaacgaggggacaggagggatattcggaatgagcccatctgttcccacggttttccatgttacccccgactcacccggtccgatcctcgccaagaggccgtcctcgacgacacctccactgctctcgatcaagaactccctgcccttgcctcccttgccatacacctctttgagctttttcgcattggcttgcaattcctccccgaccatgttgtccagcatgacgatgttggccccggcctccaacgcttcagctgcctcgtcatacgactgacactcgatggtgatcaagagggagaaaccagcggccctgcggcaggtccggatagcttcggtgatcgagccggaagcccatacgtggttgtccttgagcatgaccatgctgctaagatcgtgacggtgaggatcgacaccaccgaccatcatgccgtacttttcgacgagtcggaatccgggcgtcgtcttgcgtgtcccggcgatcttgcctcgccagccggattgacgtgcgaggtcaccgaatcgtttagagctggagggtcgagggcatgcacgaacgtcagtgggaccgatctctacggaatgagacggatattgatgacgaggttcggactgacatggttgcgatcccgctgcatcgagcgagcatattcagaccgactcgttcgccgagcaacaattgcctagcgggtcctcggacgacggccaccttggtcttggcatcgtagggtagatcggcaccttctgcaaagagccattcgacgctgatggtttgagcgtgacttttggtcagccgggggaacatgtgacgaggtggtaggctggtactaacgtgcaatcgacccgcttgaagatctcgttgaagaagggtacacccgccaagatgccctatctcgtgaggatgtcatacacgcacggatgagcaaacgactcggcttgcacgaacaactcctacttaccccgctctttgcccatagaaacgcttcttgttcttcttcccctacgacgagaccaccccagtcgaacgacggggtgtcctcggcgtaccaccgatcgatgtcggtcttccacgagggcggcagcaggtgagccaagttgggggagttcgacatgtttatgaggatgagaagatgatgctagatgggaatgagcgtttcgaggcgagctgatcgaacggtaggttgccgaatctgtgtacttctcttgaacgagatggtcgtcgatctactaagctgccaactgactgcatgctgacgggttgaaccggagttgccccgcaacaaggtgatggccgagtgatcgaccaaaacgcataactacattccgcgcaataacgcatattcactttcatctcgtcccctaaattatgcgttttcgaaatgtcagatcgcgattatcggatatgcccatcactcgcgatccaacctttatcaccactttgtaaactaatcaaacaggatcaactggaaattcatcgtcatcgagtctagctcattcttacttgccgcaccaaaggtatgagcagctcgtttagatagttcgagtggtacaggctctacttctgtgcagaagccaattccaggatgcctgtcaacggcaaatccaacggcaagaaacgagcgccagtctctagcgacgaacagaccgacaccgaggacgaacgagctcatcaaggaccgaacggcaatgacgccttttcctctccggaaaaacgatcatcgaaacgaagaaagctgcgccaagagaatggtcaggatgacgacgacttggagcatgtcctgccgcgactcaatggccaccaaagcaatggaaacggacgaaccatgaagccgctcgtcgaggtcgacgatggcgatagtgaagacgcgtcgggggaagaagacggcgagctcgaggtggaagaaggacaagtcgtccgcactcaacgtcaagtcgcacccatgcagagtctcgtgcggcacaagaacgggcaagtccggctcttctcgattcgtctccggcgtgatcactgacatgccacccgttgtagctatgtacccgggtccatcctccggatcaagctgcacaatttccttacctacaacaacgtcgagttcagcccaggtcctcatctcaatctggtcatcggtccgaacgggacggggaaaagctcgatcgtctgcggcatcgccctaggtctcggcttcggtcccaaggtaagcaattttctccttgatctgtcgcgcctgggcgatcagcggctgaacgaatcgactactcgtcaacttaggtccttggaagagctcctgatgtctcctcattcatcatgaccggtcagacggaagcctttgtagagctcgagctggaggacaggacagaggggagcagcgtgatcatcaagaggtcgttcaaaaagggcaaggcgagcacgtgggagttgaacggcaagtcgaaaagcgagcgctggctcccctgttagataggactcaccggctgatgtcgcgagatacaggcaaatccgcgaccgcacaagcggtcagcaatcaagtctccaaccttggcatccaattggacaacctatggtgagccaggcgcgtctccggtcatccagtcgcgatcttgcctgacacgtgagcatcttcttgatctcagttgcttcctgccgcaagacaaggtcgcctcgttcgcggccatgtcgccgaaagaacttttgctggccaccatgaaggccgccaacgaggtcaggttgccacaatggttcgagacgctcacctcgtcggaaggcaagctttcggtgctgatcacagtatgtccgaatgatgaccatgcgaggttgggtctatctactgaacgcttggatctttcaggacctcgagtccaacaaggctcagttggacaagatcaaagaaaagatcagcgagctggaagagatcgttcaggcgagcaacgagcggaaaaatctggaagaacaggtaggcgggcggtactccgttgtcggtctttcttgacagatcccaagctgatgctgttttcgcaactcatagttggacaagtacaccttgtatcgactgtatgcagcgtacaacaagaagaagaccgaaactttgaagatcaaggagaagattctggccgccaaagcgagagtgcagagaaaaggacaggaatataaacccctcatggaattgctcatgtgagtgcatggattttgtttgccacacttagagccgaccaccgagtagacctgattctcgtgcctaatgactataggcacgtgaaggaccaggcgtccaagagtgactcggtcctgcgagcgaaccgggacagcgccgacaaatcggaacaaagtatcaatcgaatacgctctgctatcgagaaagaagtgagcaaagcgttatgagctccggtatgaagtctttggcttattcagctggatcgacgatgtagggcgaggctgcggataatgtgcagggcaagctgtcatcgctaagggaggaagaaaaggcacgaaaggataaaattgaagagctcggaaagaaagtgaccaatctggaagccgttttgagggactcgccggcagtagacgaagcccaggctaggagagtggaagcgaagagagtgagtcgaatcgagcgttctgtggggataccgctcacccaggttagcactcggtatacagaccaacattcgcagagagattcagcgtctcgaaggtcttgacggcgacgataatgtcatgaagtctcaaatcaaggagacggccaggagatcgcaagaacagatcaccaattttcttaccgcgtgagtagccgcgacaactgctaaattgcagaactggcatactgagaccgtgctcccttgtcagcattgagcagctcaagaatgtgaggcaaaaaaggcgtgaccttgttgctaacaggctgccgcaaattggctatgcgatgaattggatcgaggccaatcgtgcccttttcgagaaagaagttttcttcccgccagcgtcggaagtcgacattacggatatgagatacgctcagatcgtcgaggcgtgtgtgaatcggaacatcatgttggtgagttttcgccggggaaatcgacctctgcgacatctgattcatgacaattcgacattgctagacattcgttgctcagactgcgaacgactacaggacgctcaacaggctcaatgacgagcaacactattgcgatgtgcgccggcagagacagcgggtccgaattagtacatatcaagtgacagatcaggaaattagagacgtcgaaactcccccaaaggtctcacttgaaaaggtcagctcgcagacaggctcgctgtggtcgcgattcgatgttcacgccgctcgtgatacagctgcgtccgcttggcttgcacggctacgcaatggatttcattcgggcggaagctcccatcaaagcctacttgcgatctgctcgcgtgcacgaaacggcaagtcgtctgacgagatgctctcaagaatttgccgttgaccacgtcttgtcttctaggccgtatcaagcggacctgccgacgtcgaagcggcaatgagattcggattgcgagctttcattcatctcgaaggtcaggtgctatctgcggttctcgtcaaaatatccagctacggaaacagggcacctcaaacacagaccacagctatcggttctggacaattcttcgggaacggaggcgagtaggctgttcgcatgtcccatgatcttgaaacacgctcatgttcgcattcacagtcaatcagagggatatcgacaactacgaaaatcagatcggaaacgcgcgggcagagtcggctcgatgcggagagcagctggagcatatacagaaggaatggggaaagcggtcgcgagagaaggagaaactgcagggagacttggtaaatctcttcgaacgtacgtacacgccggagatttgcactgacaacttgaaaccctgcagttaaacgtccaggcggagattgcgcagatcgcgagcgctcagagacgcatccaatcggcgcgaacggactcaggtcggtggttgactatcagggtcgttgaaggcgtgactgatcagaccaaacttcagattccgccaagcgcgagctgaacaggctgaagaaacagccggatgcagaccaacaacgtgatcagctcaagaaagatctgcagagctctgctaagaagcgtttcgagatagcgatgaaggcagaggtgagtcatagccggccataaacaaacctttgacacgcgtgttgactgcgggcttccctggttatcagccttttctcaaatctcttgaagacgtaaatgttagcatgtccaagaattgcttgaagtcgcttcaagcgcaggccaacaagtcgcacgtagatcctgtcatcgctatccgccaagaacgtgtacaaaaatacaaagacaaggtggcggagctacaagaagtctaccacaaggccaggaatgacgctcaagaaatgcagcaagaattctctgaagagcagacggaaatgacagccaagtatcacaaggactttgtcccagaattccaagaggtcagacttgaaggtgctgtttcaatgggacggtggactgaccgacggtgcatcgccgcgatttaccgcagctgaaccacaccctcgctgaaatcgacgctattatcgccgatacacagagcgatatagccttgcaacctgaagtcgataacgctgccgagaaccgtctgcagaaggagaggaaagaacacgacgagtatcattcgcttgtcgttgctcagtccgccaagaaggcaaagtatgaccaacagcacgagaccgcaaaggtgagcgaaaggtggtggagagccgatagttgggccatacgactgacgctattgcccagaacaaattcgagcccgctctagaagccctagtggactccgtctcggaaaaatttggagaggcattggacagtaagtttgttttggctttagtactcgatgtctggctcatagtatcgacgcagaggtcaacgtggttggccaagtgcgtcttcgccggacgccacgatacggggactgggctctagagattcttgtcaaatttcgggacaaggaagagctgcagatcttgtcgcatcaaaggcagtctggtggggtgagccctgcaaggtgaccagtgttgctcgggccggccagcgctgacctatgacgatcgacaggaacggtctctgaccaccatcatgtttttgatgagcttgatgaagctgtctcgaacgccgttctcgttggtcgatgagatcaaccagggcatggatcaacgtaatgaacgcgcggttcataacttgctggtcaagacaactagccgaggttctgcaggtatgtcgttcgatgttacgagattcgtgggatattcactgatttcacccctatcgtcggcgtcatcaggccagtgcgttgaatcatagttcgccgtgcatcctcgagtctggctgaggcaattgacgttccaataggtacttcctcattacgccaaagctgcttacaggtttggactacaatgagaagatgaggatactatgcatcaacaatggtaagcatgctaattgtgaaactcggcgggtgtactgacacgtctcgaaacctgcatggctttaggcgattggtgtgagtcatggtatctcgctgctctgactggctcgttgctgaatcgcctgtcatcgtcctctacagtacctgatcctagtaaaggggaccgtttcggtgatctcaggggtttactcaacagagttgcgcgtagtcaacgagcaagtcatgcttgaactgaaaatactccctgaaatcgccctcgcgaagcaagggacgatggccctttccgatgaccgcggacaaaaataaagatacggcactacgactttgactttcccgtacaaacgcgacgcccaaccttgcacgattacttacgaaaccgacgacgcttctcccgaagctgtgttatcaggattgcgtgttgtttacatctgtattgtacaaaatagtattatacaccatcacctcagacgaccactgtcctgccgtatagtctcccatcgcaagcactacgccaaaaacgacgcgcccttaaaggttgttggcgcacgtgaacccgaggttcgggttcgagacggcatcgacgttcttgcagaggaattcggctggctccccgttctggccatagatccgaatgttctccgtctcgaacccttgacaagatccttcgttggcgcagctgaagaagacgccctgcgacccggtgaacggtggcaagtcttgctcgtaccagcaagggtccgagatgcaagagccgtcgccaccttggaacgaattgatatcaccgacccagtccttgaagctaaagtttttcaggatgacggaaccattgttgactcggtcaccgcccgggttgttctggtcgacataggtctgagtgacggcgataggataggtgacattgtaaaggcggatgtcatggtacttgacgttttcagtgattccctgcccaccgacccaggactgacgagagaagcgttgtcagttgggctgcctcgactcctagtcttggtcgtacccccagactcaccttgaaccgggcgccatacagtgcgtcgatcattgtgatgtcctctaatattagcaaaaagaaggcgactacgtgagtttgtttctggtcattaatacgtttcgagagtgcgtaccgaatgtgatgtcttggacggtgttgtattgcgcctgattcttgcccaaagacccgatggatagaccgtgcgttcctggacctccgcacgtagccttgcgcatggtgatgttacgggaaggtgtggtgatggcaaagcagtcatccccgttgtcgatctttgagtcttccgccaagatctatccgaagagatggaatcagcaacagctgggaagcgatctcgtgagggagcaggcttacgttggtgcccgacaatccaagaccatcggctaagtaggtcgatcacacagcatgcgtcgcttagcttctggctcgctgcggaccggagagaatgaacccgggactcactgttgaaagggaacgctccagacttggaatgcgcattgacgacggtccccccgatatagagatcgtctgcaacgatcctcgtgttccatccgatcggtttctcgctcttcaagtgcatgatgctcgactttttgaggtcaaaacggagaagatggggtctgttgggtagtcctccctgtccggcggggttggcgtcccaccaagcttgtccatgggctagcgaacaggacgtgtgtgagaaccacacctgatctcgacaggcggtctagactcacaatcgatccaaccggcgctgatatccctcgtaccctcccattccaaaccctcgcccttgaatttgaaccagtacccgctgtacactttgggatcggcgacgatggcctgggcggtagggatatcttccggcaagtgcacatttccgtagaattcgaccttggtcccgttcaacttgagcgcgctgacgggggtataggcgttgctgcgatacctcaaagttcgatcccggaggatcgagtttttattggtgagcctgctgatcgatcggcggggacgggtcaacagtacgtactaccgtactccatgttcaaaggcgacgactccgccctggctacattcctcgaacgctctgttgatggctggcgcgtcatccgcatctcctcccagagctttgacggagcatcgtttcctctcgcccgtcgaaggtaccgaggggttggaagaggtcgtcggttcggggacggtcgaggttgtcggttcagggacggacgaagcgatcgaagtggctgaaggggtggctacggtggtggtccggcaccacggggcgccctgagcgtgcgagttggcgtttgccggtgggctgagcaggttgaaacttggtatcagttgtgatctcgctttcttcgatcacgaggtaggtacgggactcaccaaggtttgttatcgttggcgggagcggccgaggctggggcgagtaccgctagagcgagaaagagcttgacgatggctgatttggagagcatctctttggtcttctagatgtatatgttagatcggtccgaggtggtggtgattgggtgcgcttgctggttgctggttgctgattgacgaagatgaagttgaagttgagaggaatggactgtccagaacgttgatgatgatctccaaaacctttgccttatatcgtcttcccgctctctcccaaatcgaccgatgctgcccagaccatgctcgtccgcaggcgatggccaagtccacatcgtcaaactgcaccatcatcaacaacaatcacaacaacaacaaacaatcatcagacaacgacctcgatctcccggtttgccactactacagtactacctgctccaggttgaaagccccctcgcgcgctaaaccccggcccggggtctcccccttttcaccagctggggacccgcaccggggagagtgacctggtagtcggttcagagtcttttcagtcttttcgctcggtacctggatcgcatttcatgggatatatcgatagctccatcgtctgatctcgcagtctattattaccccggtccgagggacgaagcgggggtcgacgggatgtcaggtggtaagggtaagatgtggtccgtgcctctcccttcgagcgactttggccttttcggctcgcagtctcgaggttcacatggtcttattgtcttggcatcccatctctcggcccggatgaggattcttacgtatgtaccggtaaattgctgccaaacttgatagttcatcagagatcaaagactggacacaagatgtcgtatcaacgtgacatccaatcgagagacatgaagcgagcatctcaagacagtttcgctccttgtcaatagttattccgcgcgcgcgttagtcgacagaataatatgacacgtcatgatcaaaaacagctttacttcaggattgcaggtaacagggatcatctacttggagcatacagacttgttcatggtcatcacgatatgaacatcgagatggattgatctttgatcactacccgatttggataggctgatgctgatatatatcatctggtcgcagtatcgtggcgtgtctttttcgcgtctatttgttgcacttgtatacttttatttgataacatatgatgtgatgattgacgcacaatgacaacaacaacaaacaacaacgatcaaaccgatatccatccaacgacgacgacatttgatcgaaagctcacacaacatcatctatgcaccacggcgcacgtcattgttagggctccatctcgataacagatagtacgattcctttctccattcttgaatcctcgtcggaaatcacagtcaagacatccgtcgacagtatgcccaagtgaggcgatccgaagaacccacccaacctttcgcgcgtaggtcatcaatcaacatttcgacacaattccaaagggaacgcaaaatgtcgatatcgttacagacgcccactcggggtcgactttattctcaagaggatgcctacttcactcctacttcggctcatatcagtcgatttcaacgtcaaccttctggacagagtgggacgatccctttcgtcttgcctagcgtcaaaccaggaatgacgtcggggggcgaacacgcccggtcctttagatcccaatctcagtctcgggtcgacaaggagaacatcaacagcaatagcaacaacgttggcaacaatccacaggatgagcagagcctgctttcttcacccaaatcggccaatcgtagccgaacgagatctcgcccacaacaacccgtcctcaccgggtccaacgtctggcaagacgcttcccgaccttgccccatcccgctctcccacgcctctgcaccgaccgatggatccccgctgaaacaatctttcaagctgatcggatggacctcgtcccaaaagcctcggatgggtagacgatcgatcacgttccctatgagcgccaacgtctcgggggatgctggagatcgggaggtggatatgggttccgaggagggttcgatcggtatcggatcgcccgttaggaggagatttaattcggatcattcaggttcaggctcgggtgggacggtgagtcggatcgaggacgttttgccgtcttgtttcaggtcgaggtggaagctgaccagaggtatgactcggtgttgcgtttccaaaagcgctcccctttgcgtgccatcggaatctccaataccaccagtcttgatccgcccggcaccccaagtccagcccaaacggaccgttcacccacgcctttacaaaaatctcgacctcgatcgccatctcaaggtcagactaccggtcaactgctatccgccgtcttgcctccacctacgccttctggggggttacgtcgaaagtcgaaattcatctccaaacacgcctcgcggctctcgacgaaacccttctctccacctgaaaagatccgggtccaatccgatgtccgggggagcgtggagattgcggtggaaaatgatgtcgagaccgaggtcgaggtcgaggtggatatcgtcgaacgtggggtgatcaggactggaagttgggtctccgaggcgtttggggaggacgacgatgccttgatgggtgcgagtcaggattgcgcggtgagcggatcgcagaccgaggcaagtctccttatatcggcgcaaaaggcaggtcagagtttgcgctgacgatggctctcttcctgatccttaggacctcgccggatcctcgcaggatgttgccgtagcgtctcagactctcacgaaacgttcgagcccgctcgtcgaactggccagtacctcgttgagacgctcggctaggctgtcagccgggaggacgtctgcctcgccgagaccggatcatatgaacgacctctttgaagcttccaacgattcgtttgtctcggcgtcttcgtcatcgagtggaatgcgcatgggtacttcgaaaaaggtggtcggcgccggtcaagaaccgtcggcacacacggccaaacccgcaactccgaaaccgtctgtgaggcgcaggaaacgatcgtcagacgtcgccactgtcacggccgggtctgtgggaatgacgtacgagtctcccaatccgagggcaaagaagaatgctagaaagtccgtggtcatcgtcgaaatccctactgccgcctcgaggtcggtcgggagcccgatgcgtggagtcgtaaggacgtcaggcgctcgtcccgcagcggaccctgtgaccccgcaacgaaccgcgccggtcaagagagcggctcctgcaacggataaacctgcgagcaaggagtctcgcaggtcgaacaagtcggagactaattcacctcctcacactcaaggtcgagctacggggaagggcaggaagtcgttgggcgctcaactcgataaggttcagagggaggaagacaagaagaagacgggcacgtcgagcaagaggagaaaggggcgaaagtcgctcgcaccggcgtttgtcgtacagaatctacattcggtgctcgaccatcctttgagaccgactagccctacggaggaccctctgctgttggtcggttcggaagaggcgtccagttctcgtcggggctcgcgaaagtcgacgtccagtacaccccgaccgggaaaagaaaagtccaagagaaagagcaagcaggttgttacgcagcaggagagcgacgctagtttgtcgtctcctgtcacacctctagacgagacagcgaaccgggaacaagtgaacatcgctcctgcttccggtcaggtcaccattgagcaccagaccccgcatgcctacccttcaccttcgccggtacagatgagcgaccgtccacctagaaccagcagccctgcctaccgtgaattccgagaatactcgccgcccaacgaggaaaattggcaatcgctcgagtttagcggatttggagagggagcttgcgactcgagcccgcctgcacgagccgcttctgcaggcccctcaagacattctatcgagccgagcctcatcgagttcaccctcgccacagcctcgacccctctcaggactccaatcagcaagcgacgcatctcgacccctcatcatgggccgatcccaagcagtacacccgcacgacctgaagatgaccgtacaccaacagacgagcatgaagtgtgggaagacgctgacgaaggaatcccggaggattacgcctcggaaggtgaatacagggcgaacgaccgcgagtccagcccagtatacgaagacgccgaggacgtgacagctcaggttatggaggaccgaattgaacaggtcgattcggctgaaactgaagcttctgatacaacccttccggcagcggcggagtcggacgacgacgaagaagaagaagaggagaaggaggaaaagggagaaacccgagaccataccaggatccaagatgaggctccgccttgcgtgcaacccacagtcactgacgactacatcacgatcagaacggttgtcatcaaggcagaggacgaagagctcgacgtgacgcctgaagaggtcaaattgtcgcgctcgacgcgcccagacgaccgtgcgacaaaaaattccgaggaaatggtggtaaccgaggttatcgaaaccgcgacagcagtcgagacaatcgagactgtcaaagtcgttcacaatcaaccggtctccgataaaggagcaccttcgtctccgacaacatcgactaacgagtccacagagtctgcccatgcgggcgatgtctcgggtcgcggcgcgcaatcggagacgactcacaagtcaggatccgtcgaggacaatgcacagcaacccgaatcacgtggggatccacaggagatgtctcttcccgagacgcccgagttggaagacgaagcacgatctaccgaccaggagacagagatctctctgggcgctgaacggaccactaacatggaggtagctggagtcgataatgattacacaagggcgccgatcacgatctccagtcaggacccaagagcggccgcgctagctgctgctattctccgcagagtaggtccggggtagagactgttgattctggggaacatgagctaatgatactaccaattgtcatcagagccaacggtacatcgaagccagcgccgcccctcctccacgcaccgcagagacaaacaagttgaagcgccgccgaagccaatatttcgtatcggccgaatcggcagcggctttgacaccggacgaacttcttcgcgaagcagagctagaactagctgaagagcaggaggagcgccgtcaaacccgttcgcatagggcgaaaagccctggtcaatcaaacagcgaactcttggccggatcgagttggagtcgcgatgactgggccgtcctcgaccggtgttatcgtcgggtgaagcggtcggcccgggaaaagggcaaatccagagaagattgtatcgaggatgccatcgacgtcgacaaggttatcgattcgttcgttttcaaaaagggacttgcgcacgaggaattggagcatggcaaatgggctaggtaggtcgaggcggtccgagaaactgatctgatatcgagctaacgagacatccgtaccaggcctgaccttgctattcgaatcggtaaattgcaccgcaatgcgcgacgcaagtctgccgaatcccatgtcgactcgatgccttcagcccgacgaggaccttccacagccgtgccgggtcctgcgtctccagtcgtgaagaagacgcgaaccggagaggccacttcccggccaacccaggtcgaggtgcatctcgacaaggagacttctgaatcgtcctctggttctggttggtgggggtccgttagcaagacctggaagaggatcaagagcagcgtgtcactgtcctccatggtccaggacgaaactgaatctgagccgtctacggtacacgacgaggacaggtcgtccctgacacgccctatcgaaacgcgggaaagacaggaccgtccggtcgctcccaagcctcgtcgagctcttcccggtggattgtcttctttgccgatcgacacacccatgcacccgaccaactttcgcagctttgggaccggctcgctcgcctcgcccctgatcaaggctgcgcccgacctcgtgggttccagctctcgagcggattttttgccgacctctgagatgaaacaaatcgacacccgccgcgtcacaaccagctcgactgcggaatcgaccgaagacacggtttctcagcgatccgccgcgatcaaggctctcttttcgaccggagccagcagcccccacttctcggccatccctgcccatctctctcgggacatccgaccatcccccttatctcaatccgtctcgcatgttcgacatggacagacccccaaacaacccattgtcatcccacgggccagtctcggctcgagcacatcctctcccgccgttaaggatctcgttcgatctttcgaagaggtggcgaaccgatccatgatgtcatcctccaccgaaggagacgtctcgtgcgagctgggcaatcacagcagtgtacgacgagcgaatagcagtgagagctttcgcaggacgagcgcgatgtttgaaaagtcgtttgacgctcaagagtaaatgggcgatacgatacgagacagatggggatggggatgggcgcaaccggtccgaatgatactgacgatatacacccgacgggtacatagaattgacttcgagactaaacctgttgtaacgaccaatatacgcccttgacgatcttgctagagaagatggctgtagccgtgcatatgacaacataatgagtagtacttgacagatgtcaaccttgatcgtcaaaatcgtggctatcccgggtccgcattgtaaaaagcccttgtttcatgttaacctataccgtccgctcacctttcgcatcttggcgggtagactgccgtcttttgccttgtatgttcaaatcgctgaaaagctgcggcaaccaaacgtagcattggatctcggtgtttcggtgggagcgctcgaccttaactaaagctggaccggatctgctggatatcgctcatgtatacgacaggatcagtttcaccagggagttggtcatatagaagagggcgaagggaactctacttcactacgcgacaccttgttgagatgggtcatctctcgattgtctccgtttcacaaaagtgatatatgagtctcaattcaacgacacagttcagcagcaattccattcctctaaaatccgatgcttcacgtcaacgatatgcaatcgctcgatctcgacttcgttgatcgaataggagattgaacgtgcggtgatgagaccccgaagtaatatcgagtcaccgcaacccgtcaagaacgccgttcgagacatatcgagcagacttatgtagtcctcctagctccaattgttgaacatgaagcaaatgataggtgccgggacagtcctgacaagcgacatgcaagcttgttctacaaccaaggcgggagcgtcatcaagtgaggaggatgtaaacgaccgaatgagatcccggtggggcacggtagctttgaatcgtctacaaacgccgacctttagactctggctttcctcacgaagggatccgaccgatatatccagatacatcccacccggagaagacaggcttctctcctacagtaatatcaagctgagctttcgcctggtgcccctattatggacacgatttgccttgcttttctggcgaggcggtcatcgatatcggttactcggctttgtgctctcaaaggttatcaaaggctttcttcccgctgtcaaaatcttcgcctcgtccgccttgctgaatgaagtgcaagccagctttctcgactcgagggagaaggatgtagatcaggcaaagatcatcaagatggccggcttgtggttcgcaatctcggccggtaatttgatcctcgactttctgacgaccagcaacaacgtcatcgtccagcatcacgtcaatcacgaggtcgaaaagctctacatgtcatcgcaactctcgctcgacattccgactttgtccgatccgaccatctcggcactcatctacgaagcaggatgtttcgccgggttcgagagcagggcctcccggccgggtatggggggctcgatgtcaggcgtaacgaggaaccgaggaggtccattcgcgaccctctctcagttcttgagctcaatcacaatttcggtcgaggtcattaccgccagcggcttgctctaccgcacgctcagtaccgccattggagagattcagggctcggacgagcaccgggatgccgtgtcgctcatctttggtctctcgaccaattcagtcctcctcctcgtgctgtgctttctcccttccgttttgtcgctctgcgggacgctcttctccctctcttcaccattgaaggtgagacgactagctcctggcaagctcaggggaaacccagggatctcggaatccgaatcccaggctcgcatggacacaaactctcaggtccagcacgtcaaggtactcggcaagaacggagcgtacaagcaagaggtcatcctttttggtctcaaggagtggattttgacgaaatgggaggggctcgtacagttgcagatggagaccgagatggcacatcggagtcggctagggtggatgctggttagcttcagggtgtccgaggaagcggtacagacggcttttctcgtgagcatggtggatatagtactcgtttggcgaccttggtaccaatcgttattcttctctggatgtaggtccttctggccttgcgtagcttcgggacacgcatctcgctcggatcgatccagctatatcagtctaccggcacctccctcttggcttcgctccgcagcttgactcgaagtcttcagttctcggttcaatctctcttttacatggctgcctttttcgaggccatcgacgtcacatctaccttggaagaaaagggcagaggggccctgatggtgcctccaagcaaggtcttggactacgaatcgacccgtcagccgggcgggatgcgaatagaagctagaaacgtcgggttcacttatcctggtgatagtgagccagtgctaagggatatcaacctggtcgtagaacccggttccacgttagccgtcgtcggactgaatggcggcggtcagtacgactgtgcatatggggtcgaccagggccaattctgatccgttgcttggctctataggcaagactacgctggtcaaagtcttgatgggcttgtatgatcacaccggtgatctgctcatcaatggccatcccgccgaagctttcccctcgaaacaactgcatgcgcacacgacctgctgctttcaagatcacgccaagtaccggttgactctgcgggaaaatatcggcgtgggcaatgtggatctcatggactcggaggtggacataaaccaagccatcgtgcggggtggcgccgaggcagtccgagataggttaggtctcgatggcagactaaacgatagtggagttcccgagaccggcagcattgtggccgcggaccacgatccaaactctgtgaaaacgggcttggctgagaaacgaccaggttcgacgagtttgcgctttcggggagcggtcagaggcaggcctggcgcaacaggcgaaccgatagggaccgccaccgtcggccacaggaaagcccctggcctgcaacgcacgtcattatctggcggtcagtggcaacgggtggcacttgctcgtgccttcatgcgggcagatgaatccgacctcgtggtttttgagtgagtctgaccgcaggctgtacacttggactgagctaagcgatgattcacatagcgaaccgtcggcctccctagatcctaaagccgagcaggccttattcaagagggtacatgccttgtcgtctggtgagaatggcaaacggacgacgaccattttcatctctcaccgcatccagacggtcaggcgagcagataagattatcgtggtcgagaacggagtgagtcggtcccatttcacatcagggtgcgagccgaaactcatttcaccaccttcatgtctagaccattatcgaaagtggatcgcatgatacactcatgaaactggagggccggtatgccgaattttaccacttgcaacgagaaggtttcgactgagataaaggcttgccgctgcaagacatggtttgaatatgttatcctctttcggaagagactttgtacactgtaatatccaatcattatagatcaggtcaagaatagcgatcgccatgtcacttgacagaatcggaccgtcaatctaaagcgtctacgtaaccacttgctaatggtgagactcgcccctgatatcattggacgcaggccgagtcagcttttcatcttggatccaacattccatacgcggacttgccagcatcttcatgctctctcgcagtgtgtcaaccaagtcgtttgccctcttggtctcaggaatcttgccgtgtgtccagcacacctggctgatacctcgcaaatgctgagacgtaagataccacaagatggcaatagcagagtctgagttggagcaggtggcagtgagtaatgccgactacgatcgcgaagaccgccaagatctcaccaagctttggcctctctggcacgctcatcgccttggataggcgaacgacaaactcgcaagcctcgatcatgtcggtcagatgttcgagcggatcatccgcgaaacctaggatggcccggaccctgtaaatagaccgagctggtcgtcagaccgcatcactagcgggggaaaacaccggcaaggctcacgcatggatggcagatccggcccagatggattcgcgatcaaccaatcgttttcgaatgatcggtggcaactggacacaatccgtaggcaagtcgctgctgaaacgttcaagcgtctcgagcagctgttgtcgtcgggtggaatgatccgcctcgggttctgagacgcaacggtcgtagtacctggatcgtctcggttgtgtgagtgagggtgacggccagcagctcgtcgggtaacccacctttgtgctccatgcagtaaggacaaggctttcaaggtcgtagtaaaccaaaagtcttttggcttttcatcgagctcttctccttgcctgccataagacgaccagaatgacgctacggtctcgtctggcactttggaagcagtgatctggatgcagcatagatcaggacacggttctcggcaaattgcgcagtgcttcaaacttacatgggtgtattcaaagatgcttcgaggccaaggtgtcaggatttcctcatcattgatcgctgcgggacgacgaggtatcagctgggttcgatgtactgctcgagagaaacaaagtcatcctcacaggaaaggcatccgagagctatcgatagagagactgggtcagcttcgggtctgtcttgacgccggggataagggatgagaggccgctcggcgacgtacccaagcaaccggtccgttcgaccatcaaacaagcccagctagtgaccggcgtcagtctctttcgtcgtcttcgcagtcctggcaacgatccgactcacaacagatggatcctctcgcccagctctgcagtgtcctccgaaggagccaaaatggtagactttgggatgacgtggttgaagagcattggtttcttctgcgtcctcgttaccagctggggtgcctcggcctcgacggcctcttcctgcccttgttcaagtacctgctcgtccatataatctagcctgagcgtgtgcatccctgccaaggttgctaatctcaaggcctgcgtcaccaaaagccaaccttcggtcactttgccctgtgtgtaatacacctgagtgatgagcaccgcggcttgaatggcgtcgacgatccgctccggatacttgatcgacacgacgaaatctcgctgagccgcagcgagaaactgagatccgagccgacgagccagcgtctgcatgtccgtggcgagacccgtaaagcgcgaggtggcgacgatgcccatgatggccaagatgaggcattttgccggtcggaacccagagacgagggccgcatgaagccgattgagggaacgggtgtagaaaaaggcctcggctcgtttgtaaaacaagtcgatcctgacgcgcgcggcacggatgtcatcatcagcctgctccctgtgacccagactgaataaagtgaccgagcgactcacagttcaccgaccagcgaaccccccacctgctcgtcgatttcgccgagatcctgcataccagccgtcacgtcgatccagatctgcacccagactgaatcctgctctggcatcgcgctccctgtccttgtcctctttttcctgcccgtcgaggggatcgtcgaagtcgagccctgctgatccgggtgaggaacgtcggaagcgacctctgcagcgttggcgagggtcatcaagtagggttcctgacccgtctgtctcgaggatgatgcaggggtctcttccagttgttcatcgaccgcgcccatggacccagccctcgcgctgatgccgacgatattgtcactctgcgtctgcgtctcggccctagtcagcccttgctcgtctgcgtcagggtaaacgcctcccaaggccgagtccgtttccccgccttgtccatgaatacgatcgccttcaatcgcatgatcagcctcggccgccgcagcgctctgttcgaatagcgcgttgaacccatcgtgatgctcggccacggtcatatcgatagcaggtagttcgatctcgtccaaattgggcgcgagatgaaaggcgtcggtttccctctgttgttgttgttgttgctgttgctgctgcgattgctgtgatgggccggtcccatcgacggccatgcccgtagcgtctccgtcctgctcgcttgtgcccgaagggccagcgacgatcggttcctgatccatctctccgatcagctcggtagggtctggcaagatgatctcgggcgtcagttcgaccgaaccgaccgagacctgtgattcgacgtcggctgtgcgagggcgatagagtccatcgtgtcagccagccgttcggggcttccgaaggggatcgagctgaacctgtccctaagcggacagaccggatctactcaccgacccgagctccatttttcttgctcgtcgacttgcgctcctttggcatgctctgtacgtacacgcaatgtcgttttccctgggtctacgacgcggtgtcgagtcgattcgattccgtgcgaggtccgagtgagctcacatcgcctggaaaggggcacatcattcgcgctcaccttgaggcagtttgtgcagattggcttttcaccatcacacctcaactttctccgtttacaaaattcacaagcatttccccgctattccgtccgtgcagtgtcagaggagggagaaacaaggacccgcaaagaggattgcgagaaagagttgaccccgacgtctcagccctggtctgtgcgaatggcgttgcgggccggactcaccggcaagacgcgcccactggctctactcctattctgcctccttttgatctcttcttcggtcaacggtctcgacggatcgtcgtccacgggggggatgggacccttgagcttggctggacgtttacgtttggttccccgggtcgatttggggttccgagcgccgggtttgcccgatgggtcgtcttggccttcttgaccttgatcgtcgtgctcgttcgagatctgggtgtgaccatgcaggtgatcccgatcctgatcctgatcctggtcgtggtcatggtcatggtcgtgaatttgaccttgaccttgatcgtcgtgatgatcgccagagctgcgtggagtgttcgacccgggggtatgcgaacgaccttctccgtgggtatcgacgtcgatggaaccaaagtgctgaaagatgttgtctctatccccgctcatgacgtcctgaatctcatcgtggtcgcgatcctggtgatgatgatgatgatgatgatggtgatcatgtcccccgtgctcgtcctcgtcctcgtcgagctgatggtgatgatcgtgatgttgcccatcatcatgcccatgagaagtccccgctacgtcctcgtcaccctgtccagcccgaccgctactacgccgcatgtactcttcctgctgttgcagcgtggccgacatgtctccagcgccatggccgaacccctcgatgactctctgcaaggcctgtttgatgttgatgttcatctcgaggtccaactctccctcgccgaccccgacgccggcttcaccggtatcagggtcgagctggtcggtgatggggtattcccccgagacttgttgttgcgtcggcattgtcgacagagtggtggtcgtctggtcatcgtgcgaggttggtttgtcatgacgatcgtccggtgtgacttctcgaccgatatctactactctatcgctgtccatcgtcgatggtcgtggtcgctcgtaatcacgatcacggcgatgacgagatggtcgacctgggtcacctcggtgattgaggtttggtgtgtggtgtggttggggttagggggttgctcaacgagatatggtgaatcgatcgattgaagcgggggagatggaaattaggaaaaagtccgtcgatcgatgaaaagtagtagtgaagagtcggttgggaggcgactatctcctagagatgacgcaaaggatagagccctgcacaagcgcgaacgaggagagggagtcgaataacgagttcagatgtgcagaacttgagagtcgcaaagcccatggtggtgcacgaggcgatatcgtcgtcgaggtggtcgccaaaagggaaagacgaccaacctttgcgcgggaaaaagagttgccgctttgggaaattccctttgaacgagatgggatgtgaccgtatgaaatatcataccactcccagctcgactccccagagaccacttcgggcttggctagactaatccaacatgacaccattcacagacgtctccgtatcgcccctcaccctcgcccttcctccccgttgacgaccctctccatacccgacgtgaccatcctccccgctctcctcgtcgctactcccttcctcgccaccgagcctcgccgtcatccccgcaatggccccagccaacctagggttcagatccctcgcatgcgtaaacatctcggtcgcactcgtatgattccccatgatcctgtacaacttgcccaggagaaacaggacggacgcttcgatcgacgacgttcgcgcgaggtcgaccaggatgggcaaggattcctaagcgagcgccgcgcgggcacacaggagagcgagcgagatgaggtcgatatcagccatcccattctattccattccataccaccacattcgttgacgcccggtattgacgcccggacgagaccagactcaccgagtacctctcgagacccatcaaaacgcgagcctttctgaacctcgccattttgttctcctcgtcaatctccaaagacctctcaaacacgcccaacgcgccttccagatcgccttgtctttccatgaccttgatacgtcgttgcggggcaatatccatcagtcgtcgagagccgcgatcagatggatacatcaaagcctcgacgcggcttacggttccaacacaacagtacaagacgacgttcgacgggttgatcgccaacgctcgtcgaaagtgatactcggcgagcttgagcctgcccgtcttttgatagacccgaccgagcccgaacctgcggtgaaacacgatttgctcatcagtcactcgtccctttaacccgggatatgctcctcctcgtccgacttgccatgcgtgataatgtctgacgtccgctctgagcgctgattggtaatacgcgatcgccctatcaaactcttccatctccaacgcttcgtacgccgtcaacgtgtacgtatacgccatgcccggatctaccaagctcgctcgtttgaaacaccggatcgcctgatcgtgctccccctggagcgcgtacgagttgcccgtcgcgatccacgtctgtggcgccgagcggtccagggtcatcaggtcttgagcgagttgagcgagttcggcgcgttcgtccaggtgccagaggacggtcgagaaccactccatgtcgcaaagacggtaaggttcgaggcgtcgcaagtgggtaaacgcgttctgggcctgcagacgtgacggtcgatcagcgtcatggggaaagctctttgccgcacgtcgcaccctctctacactcaccacctcgtactcggccagctcgtaaaagcatcggccaaacaagcccaacgcccagcttcccccttggaccttgctcggcaacgtgtcgatcaagttcatggcctttttgcaagaatatcgtgacagctcgaaataagccgccgcgcatcgacgcacgaggcacatgagccacgaatcggcgatctgctgttgaagggcgaggacgttgagggacgatcgctgaggcacaggcgttgtaccggcgcggcctagtcgtgagtgtggtggggaagagggaggtccaccggtcgaggtcgggggagagacgggaggctggcggatagcggtcggattgaccggtttgtggagttcgagcggtgccattcgcgaccgagtttctttacgcgcctgaagcggcttgaccggggtgtcctgtatgcccatgtcagctcgatcgaccaggaactgcaagcccactcaaaacacctgaagcttgcctacctggtgattctcctgcagtctagcgctcctgcggataggaccgtgatcctggtccacccccgaaacgagtcgtcagcgcgacaggttcgtagcggcttctcggccgagactcactgctcccttcccgctaacattcctgccagtcgcattcctagcgccttcctctcccttcaattcgcccgctcgacctcttggtcgtttcgccacgggcggtttgccgatccctggctcgtatgatgaaccccctgtcacgcgaggcgtctctccgaacccaaacgtgctggatccatccttgctcgcgtgagggaatagttgactggcaatgctcggcaacgggtggctcgacttggccccacgggcaaagtgaccgtctgccggggtacggattccgggcaagagatacgattcggggcgtgtctcgcttgtaccatagtacgacaagtctggaaacgaaatgtttcccggaggagattccctgtgcacacaagattcgagatcagaccgggtcgcccacggatcgattcgccgttcgactcacgccctgatcactcctttgcctttccccttgcccggccttcctggagctcccgcaaacatacccgcgcccattccgattgcacctagacctccaggaccgttcccgaccgagctgcctaccggcgtgaatattcccgctcccattcctgggggtaacgtcgagtacgagtatccggcatgcgccgccttgaccaacggactgtgctggggcaatggcgacattttcctcctcggcgtccccttggcatcgacgtccctggcttcattgggtccagacgtacttgacgattcggtcggcggcgaggaaggaacatctgagaacgacctggccgaggtcgacgtcgggactcggtctagaggtgcgcctgaagccgacttggaggtcgtatacgtcgatccggctgtcgattcgagcgatgcggccgaaaacgagttgaggaggtttgtcaattccgacccggtccacgtcggtgggaggggcaagaggtggccagggaaaggttcgactggggtatattgtaccggttccgcaaaaggcgagtcggcgtgcgaccacctttcacctgcgggcgaggaacgggaatccccctcacttggatcagctcgtgtgcgatccgctcttgagaggacctctcgaaaccctacctagctcgcaaaacgcttcccaggcctcccaacaccattgcccatcccctttgcccctcccatcgaccttgagcacttgctccaggtacctcgccggcgtgttctcttcgcccgatccagctcgacctggaggtcgatgccgcgtggctccactttggttctccttgtcttcttcgtatttgaccgaggccagcttgtgcacattgctcgccgcgaggagacgggcgagttgtaatctcggcgtgatgggattgatcgggatggggcagggcggagtggacatgtatcgttctgtcggaaatgtcgtttcccgtaagctctcgggacacaaatcagtacgcacgtgaatgcgaggaatcagtcgggaagagcctgattgctatgaagaacgtacggaattcttcgtcgtccagcccacgttcgagcgtcttgatcgtgcgttcgagtacgtttctcccttcttcgaacctagccaatccttcacatgctcgagaatagatcatggcgcattccaggcaaggtagtttctccctctcgatcttttctttgcgcttgcccttgcctctgacggtagtgcggtgtccaggcttgacaggtctgtcctcatcggaattgatctcctcatcctcgtcgctactcgatgacgctcccaagacgtaattgagcacgccaacctcgggatcccaattgaaactcgtctccagctcttcatccgacttggcaatatgctccttgaccagatgaatggccgaatagagctcggcgttgttgataaagctccaccctttaatgtggagtgcgaggtgtttggggacatctaccatctcgatcttgccatccgccagtaggtcagacgtccccagctctaacgattgcgtgcttgatcctggtcttggtcttggatcgttcgacttgttaccagctcgtccttgaccccgttcccgtccctttcctttgaccgggctatccccatggacggtcccctcgtccgcttcatcgcccggagccacgatcacgggtaatgacaatcccgtcagcagttcggcattgtagaggtcgtaaagaagtccagagtaaaagtaggaagttttgggtgacgagttgtagcagagcgagacgagcctgcgaaggagatgatagtgtgatggtggtgggctaccggtgttcatctcgtttggtcgtcgagctcgaccttttcttgaccaacgtcgacgtggccgcagcagattgacctagtgagcaatagctggtgctgatggcgatgatgaggctagtcgtgtgaggctatgaactccatcctatccaggcccaacaccatcatcatcaccatgtcaacatcatcaaatcccggtttgtttgttttcaaagtcaaagtcgagttagggggatttcgagttttgttgacaatttggaacgatacatgatggatgatgatacatggtatgacactacagctgacggcaaccacgacatcgccatgacattcaggatacattggagatcacgagcagagcagatatcattcgatactgtacactcgtctccaccattgtcgtctccgggtgaccatgtatcgcaactcgacatcgcccttttcgggtaccacctcctcgaccgcgggatcaggtgaaggtcgctacgggacgtttcaaacaggaaaatgcgtggaaatcagtcggtcttgacgtggacgtgaaagggaggtaccaaatcagacacgcaccttccactcgtcgtccgtgtagatccatccggctgcgtagcacaccaactcgtcagcatcccgcacctctctcgaaccccgcccacgcctgccaacgtctgctcaccctcgtctcctccgagtctatcccactcggcgaccaggtccaccctccaatcctctccagggacaaaagaccaacccttcaacaaactgagcgcgaccctccctcccgcattcgcttgacccgtctctttactttttccccccggcgcttcgtcctgccatagactctcgctcggtcggttgaccggcaagacccgtacccacccggccctctcgtatccctttaagaaagtggaactccacgccgaggctggcgggtagatcccttccttgcccgtcgtcccctcatccaggaccttgccgcccgaccctgacctcggacgatgtttgtcccccaagacccccacagtcgacctcgacctcgtctcattctccgccaaccaagcagggtccaacctctgattctcccataccctcacctccctgatctcactgcgtgcgatcgagtcgtccaaccgatcggtcaagacccacctctcggccactcctctccaatacctcagccttctccgattcagtccttcccaccgtctcacccgttcgagcgcggggaggaaatccgggtgatacaccacaggcggtaggatcccgatgggcaagaggaggtaggagagcaatctcatcgggatgagcggcagaaagatggtaggcggcaagaggaggatcatgatgtgcgtggcagaaaggggaaaggtcgtcggtggtggattcgggctgggcatcgaggggacaaccagggagatgaaggggaggacggcatcgtgtacgtccgagctgacgggatcactcgtggtttcagcacgacacgacgtctcgaaaccgtttcattcccggatcgcacgatcatccgactcacaacaagcccataaagttctgaatgccttggaggttcatgtaataatccactccgctctctggaggtcccccactgaccgcggggatttccctaccattggcatccaccgccgaacccgagtaccctttttcctcccccttgtttccggaaccgtggtgatcgatatcggttctcgacttggagttgacggccggatcgttgttctgcgtcaacgtcgctgcgatgctgttcgtcagggcgttgttgaggagggacgatttcggtgcgggcacggccggtgacgagacggatggatgcgaagcaaggggcgcggtcgggtgcgtcttggtatgttgatggaggaggatgaggatgatgatgcaaaacgggatcaagagtaggatcctcgggtaaaagcctggtcgtgcagtccatacggattcgtcagacgcagcttcagccctgaacccggcctctgcactcacatatgaaactccatagtagcatccacgataatgtccacactggttttctccaatacaacacctcttccaccctgtcctcgacccaaaagatggttccgcatcgagcgacgaaccgcctgaaactgttggtcatgacgggcagactaagggattcgcgctgagaggacaacgcccggaccttgcccggtacgggaagaggcgcctgctgagtcgccttggacggtaatgtcgagggcaagaggtgagagatgaacatgtcggtcactccggatgacaaggcgcttccgatcccagcgacaccacctccggtcactccccctccaccacctcccgtaccatcgcctttcgatcctgtcaatccggaaccggtccctcttttcgtggttgttggcaaggcggcattattggggggaaaggaagccaacctcgatctgaatctattgccgtctgatccgtccgagaacgaatgtcgagggtcgtgagggtccggtggtgggctcgaaaggtcgggttcggggatcctgaacgcagaggtcgggatgtgcgtgtaggctagcatgtggttgtgatcgcctatcggtgacatcgtgcttgtccgcctcgggaataggtgtttgacacctggtatctcctatcagcaagatcaacttgtagatatgaacgctatcccaagtatacgagtgtactattcatgaccatgaaccatgaattcatgaatgaatatgctcctcctcgacgtttggtgatgtcgtcacccgcagccaatcttggttccgctcgagtccgggccccgacaaatgaaaaaggtggcaaacatcatataaccctcgatcactttgacttggtgaatcgacattcggtacattcgtaacagcagagatgacagcagtgctgatcgcgaagagacgggttgtatactcggtccactgcgacatgaatcatcggcaagtcagatcatgagctgcatggccctagcgctctggtcactcggaacacctatccggaatgtcgattccttgtccaatccccatcatcgatgaaactatcatcctcaggaggggattcttaagaatgcatgatgccaatacctattctctattatctttcgaatctatcctgaattacaacgttagagggggagtacatccacgcgcctctttttgggtcatcgtaccacgtcatctggtcgttacaaggcgtcaaatatccactaaaggcgcatctaggtaaagcaaagcggaacggaaatcctcccgaaagacggaccgtgtctactcgttgggagcgaccgaagcgatggcgctggcgagatcgaggtggaagaacggcgtatcggtcgacaagatgggcgcctcgctcgagacggacgactcggccaaggacctcttgcccgcctcgaggtccgatccgtaagggctcgaccgggcgctctcctcctgctcggctagttccactcggtcctgcctctgctgagccggccgcgaggccggatatcccctagcttcctgggcttcgacctctcgttgcgccctgtcggctggggagagcgcgtcgacggggggcaagacgggagcgacctcgttcggtcgggaatgtcggatcgatccgtacccgaatcctccggcgatcaaggctcgtctcgtccatggcgccaatacggcggcgaaatggaactcgacgctctggtcggcccacttttccacctcgcgacggagatcgatcaggttctgcactccggtcgtgtccaagttggccaccgcagcgaaatccaaaatgatggccttgcacctcggcttgttgagcgattcgacgtcctcgatggcctgaccctttttgggaccggggtcgttccaaggtcgatctccgagtctgacgttggtcatgtccttgccccgacgggtatgcgacttgacgtgatccatgatagccgagttgatatacgaggcgttggggtagaggaaagactcttcgaaacggtagatgatgacaccagagggcggcgcttcgatcttgacggccgggttggtgatcccaccgtccccgcagagcggcacgtagacgtccctgatatcggtatccgcagtcgagttctccggcctgatcctgacacgcccgagaaagtgtccacggggacgagcgatcctgaacaacaagaggacgaccgaagcggcgagcgaggtgtagataccgttctcgatcgagctgaacaccgagacgacaacggcggcggtgaaaatgacccattcgagcggggcgactcgccagaatccgtaagactgggcagggctggcgaccaagtcggcgacggcgtggatgattagagccgaaatggcggcgctagggatatctacagcagggcaagcaagccgaatgtgagtaggagatatcaagggcgccgtgacgaccgtgaactcacacttgaaggcacccgtcaacgcgtacaaggcgatgatgacgacaataccggtagggatacccgctgcaggggtcctgacaccggccttggacttgagggccgaacgactaaaggacccggtcgaagggtaagcgttgaagagtgttcccaacgtgttgttgacaccgatggcgatcagttcctggttggggttgatcttgtaaccgttcaatcgaccgaacgacttggcaatcgagatgtgctcgagcaagaggacgatgacagagacgggcaacttgggcgcgagtgccgagaggagaccggccgaaatgtacggttgaccgacgtgacgaagacccgagggcacttcgcccagaatggcaataggacgttgcgcctttgtctttcccttgcagacaccgtacgaaatggccgtggcgaggactacagtgacatcagggtcgacgtcagactcgcggccatcgactttgccagatggacatgcgacttactgataacaaatccatgcctgaaacaactcaagaaaaaggcgggtctcctgaacttggggtatcgatccccggaccaagccaatccccacttcaagagatacagcgtgaccaagcaggtgacaccaaaggcggcgtccttggtggcgtgatgcaggttcttgagagtgttgatgatgaccttgaaagtctcttcacgggtgttcaatcgagagttgatcccgaacaaggcggggacttgaccggcagcgactgaaggatcatcggtcagcttgagtgcgacccgactcgttcatcgacctcttctgaactcactgttgatagcggacccggtcatgaaacccgaaacggcaggctgagggatgaattcgacgatccatcccaacctcaagagaccgattcccaaaacgatgaatcccgagatgaatgccaacgcggtggcgatcacctgcggttcccaaccttcgctggcgtgatgttgttgcacgtacgaaatgacgttggcggtttgtagggacatgacggcgacgggtccgatcgagacatccttggaggtggcaaagaaggcgtaggtgaggacaccgatgaaactcgagtatagacctgtaggtttgggagacatggcgcgcgtcagtcctgtagataaagttctctaggcgagacgtccgaatgctcaccatattcaatggggagaccggcgagtttggcatatgacaaggactgggggacgagcacgataccgaccgtgataccgctaaggatcgagagttacgtcagcccctatttcatagatggttacatggccaccaactggacctctcgtctctactcacgcaatcaagtctccaatcaaccaatgcacattgtacctaggcgcccattgtaggaagggaaacaagctcaatacgtaattcttgacgccttggccgatgtttccgccgctgcccgtcaggtaagacaacgtgtgcacggtttctggtgcattttcgggttcgccgacgagcttcttggccgtgcgtcgagctttcgatccgaacgaccgcggtcgagcgtcttggtggttgtggtggtgttggtcgcgctcgatgtaggctggggtgaagagcgagtcgggaggttgggtcggctggaccttttctcgaccaaagaccatgatgggcgggtgaagggtgggtgaagggtgggtgaccgaggtcggagatgggaaggatcggaggtcgggattcaaggtggtttaccaggaaagtacaggaagcttggatgactagaacagaaagatgaaacgcgttgtagcctctgcaaagtattcggacgaggtcgttgatggattcggaatgaggtaggtccttgtccgtgggtatatgaacgatatgcgcgcgggttggcgaggcaaaagtccaaggccggggtacgtcgttcgtgattagcaatatgaattcgtgatcgttgatcagcgcgagtcttgcggcggcggcgcaggttaacgatgatcgatcacgccaagcggggtcacactacgacgtgttgctgagcgatgactctagcgggctaaattcagaatcgaccgatgggtaacgcggggaattcatataaccaccaggacaactcgatggcctatctctggcactctcaacgctacaacgtccttcaggagtggacatgtcgccatcccatcgattcgcggcgtctgtcgagaaaagaaaaaatgacaacccgcgcgcgtttgagatgtcgaggcgatgagatatgcaaaaagttgagaaacggattgatcacgccatcacgccatcaggtcagctctcgcgtcattttccgtctaaccggcagtgggatttacgtttccgagagaaaaaacttccgagacccgaaagaaggtccactactggaaacgtgcgcagactccgacacgcgagtatgacgcgtaacttgacggagatgactctatctttgatgtccgccttgatgctcggtcatcggcttgattggtcatctttcccgccggaatcaccgatcggttgcgcacggtctcattgcctccgccgcaccccacgcgtcatcgatatggtggcgctcgggatcgaattatttcagtggatatcgccgacctccccgcattttgattcttcggctcaaatgacatgcaggtcgacccgtaagattgcatttcgagaaccgaatccattgcggacaatgtttgcgttctcaacgagacaccacaacttgctcgacattgcacagtacgataatttgtacagcctggaatccaatcgctcgtgtagggaaaacgtcatgaatcatcccggcgggtaacctcgagcgcgccgagttggttccctgagacaccaaaccgattcagctgcccttggcctgactagggcggggcgtaggcatcgggtgggtatggtcaggaatgcacagatacgccgcgtccgatgaggagaatgtatcgcccaccatcgccagtgctctgacgctcgaatgtattctagtgcatcggctagatgcattaaacacgttctcggtggttcgccgcgcgtgatactgatgcgcgtcctcgaactaccgatcattgtatcgtcggtcctgggacaatattttatagtcagggtgagaataggtgtatgtactctcatgtgtccacgccatcgacgatccaattgcttcgcgccgtcccccatcgaggaaaaaaggcgagcccgattggttgccccctggatccaccggagaacctccatccggcgttcgtcgataacgaattctcttgtgtccgaccctgattcgtcgatcgcacgatcgaatatcgagacctctttcgaaagcgattggctgccttcacggtagggctatgagaacgaccaaggaaacaccgtttctggagagcgacatgcttcatggccgttgattttgataaactctcgcgaatgcgctgggtgctggggttcgacatttccacgccgtcctcgggcaatcgaagctggctttacgtttcctgaccaaacactgacatgatgaagcaggggagatgtcgatccgattgaaagccactgggaaactggttgcagaaaggcaaacttgtaaaggactctaatctatgcatttcgatgactgtccaagctgatggtcagaaacctttgtgcaatcgcccggctggaggccagaggtgacaccatcgggtaatgataacatgcatggcaatatatcgacggtcacaacggcatatacaacgtggatgacgtctcttttctttctcgaccaggccgcttcaaaatgcttggaacgagtgagtaaggatcgagccttgtcatgactagacccgaataagtctgcgccaacgactggcggggagactagaggatacacggctgtaatggaagcatcggacgctcagatcgaggctgaaagtaaagtccccagtagatcgcagtggcacgaagccgataaactctgctctacgcttcgtcacacttttattaaaggctgaacctagaaggtacgccagtctgaccatatgccgaggaggtggacttttcagattcggcctccggtgggttgggtgattacgtgatcctcttgtaagcacaaaatccgggtctgcgtaacctatatttctgatttggctgttcctgattctgatagggtgcgcgagatgggtatctccctttttaccggacgatcgaggttgtgattcagagtgatgcacgggggttacatcctggtaggcataacaacccactctcacgccctagagaaatgctcagccatctctgctacggatgtcgctcgcagtctgacttcgcctctctctagtggataaagtaacgccccatgtggatcgacgaccatgccatgttcttctcttccacggaatgtggcgcgcctccacgcaatgttcgcccgggcgtttcttcgggactagcatttcgggcccggcagaagcctttgaggaacttgcaaggagacacggctgtcattgtattctgcgagtattcagagccgcgttgggtgccgaaagcaaacagtcggcgggtgacaatggtcgtcggccaacatactgaccagggccgcgagccggtatctgtttcttgcttgccacgagcaggataaaagagcacccataccatgctatggtcggcaggctattgatccttttttccctctctcgccagaagcaccggtccggagtttgtgaacggcgagttgggtatatccgctcctgaacgtgacgacatgatcaagtatcattgaccatgaccacgaccgcgacgggcgctctcgaaaacgaactggaatccgccgcctccttccctccccgtttggctcgcttttgcctagttccccgcgcgcgcgacccccgaaattggtctcgtttcgcgggtctcggtctcgcatcggccgcttagcttggcgattgaacctccagcctcgcctcctttccctgcctttcccctcgccgagccgaaatgtatctcacgtccaggtccgtccacaagatcttgttgttggtcttgagcggtcgccgtcccgtgaccgtgacaaagaggggtcgctcgatccttcgtccgtcgcgttggcgccgatctgcggttgcgaagagacggttacacctctggcctctggagaaacccgagacgaggcgaagtatgggagacgtggccgttgacccgttttccagccttcggcgacctcgggtgggccagtagtggtatggcagatgtatcactgagtatcagccgagtggcggcctcgttgtcatggtagttggagatggtcgttcagtagtatcattttgttcccccccatcccgagtgtgtttccggcttgtacgggatcagtttgaccaggtcgtcgaccgcggcggagacttcttggccaaaaagagaccagcactccggcaacaacctcgtcgtcgtcgtcgtcatcaaacccaccacaatactcactcatatcaccctcccgacagatcctctgcggaaatagtgttccaaaccagaccttatcatagcggtcacgtcctctgaatcgcaccattgccgccgccgccgccgccatcatcaccacttgccatcgtcctcgacgtcgagtctcgcgtacaagtgacgcgggaatttcaacggaagagcgaagtgggaggataaatatacgatataccctcgaacggatatcgcccaccctcgcacctctgccgctcccggaatcatcgccggacacctggtattctgaccgactacgggtaacagttggctgtactgtagagacaaagatcagggcatcttcgagtgcgcaagggcgcatccaggatctactacccgggatcatccggaatcgaccgatcgctgttgatagacatcggtttcggacattcgtcctgcatcttgatcacatcgtccaagtcacaagagaatagagacggtcaaggacaaaacttccacgtcgaaagcctagtccaccacctaaagatacccttcggggcctttcgtcgatccttggtcttgacaattgccggacgccggtcgcctgacatctccatcgaccgctcgtcatgtcgcccgggtccaacccgttcaaccaccatacgaacacgcaggacttttccgactctcgcccatcgtcgtttcaagctcgacctggccccgggcactctcagcccggctcgcctttacactcgcattcggattcgtcacgtcgagacccgctcgcctcgccctcgaaactcgacccgatcaccatccctacctcgcattccggccccccgtcgtctactccaccgccagctgcttccacaatgacacctacacccacatccccgatgacaacgatgaatcccggacctctgacgaccaacaactcgatgacggctgttcccgcgacgcgatccacttcatcgcccccgccttcgacggcaatctcgatgtcgaccatggaagccagcatgagttatacgcagcaggttctcaacgctgcacagaggaagcagaacattgcctgtaagtccggttcgattcgtcgatggacgagatcgacgggtggacgaaccccgagatgaagaaagatcaagctcacctcgtttcgaaactcttttgcgctgctattctctctctctttcgatgcgggacggcgggggaatcgctaggtgatggctgtcggagtagaaaggtgaaatgcgtacggcagccgggttccgaacgggtgagtgctgtgttacattttggtctgatccacgagatccgcaaggagaggatcgggtgggtacgacaataccttctgatgctgacaattctcggtggtactacatgacagtgcgatcactgtcgagcgaaaaagacgccttgcacgtgagtaggcggcctcgaagtgtgtcgtgggcgatcccgatcctgacgctctttacgaccaggtcgcattacgtgacctcgctttcttcgtcccgtcggaagacggcgggaggaaatggagcaggcatgaacgggaacggcggtgggggatcagggacggcgagctcggacgatctgcccgtcgcatcggggtcgggatcgggatctgcgcctggattgaacgctgggtcaggactgggagagagcagtcggagcaaaatcgatgatgacgttgatggcggagacaagaagcgaatcaaacgacggaaaccaaggcgagtcgggcgtgcggccgaacccttgcagtgatccggtactgatacgtcgatcacgtcccagtccgagcaaccaaaccctgtcatgttcgctcacacctcagcttggtctcacgtccgacgacttttcaaaagcgaccaataccgaacgtctcgcctcgctgctcgcctacctgttctccgctcaccccgtcgtcggtctcacgggcaaatggagggatccaacgcggacagagatgacggatgggatgccttattcgcctactttctgggaccggcccagcgcggcacatcaaaagctgaattcagacgaggccaggcgagagtgaggggcttttaaaaaaccatcgcagttggtctctcgcagatcactgatcctacttttggcttgctttttacagacttgcaagcgatctcgtcgagacatatttccagattgttcatatacgcctaccactcctggatcctagcctttttcggcgacgttttcatgatccggacggtcctgacggtccaccgttctggcctattctcgcctgtgtactagcgtggggtgccaagttctcggaacacggcatcattgccaaagatcgagaagagtgttcagtcggtttgcagggagagcgaaagaggagtcgtttgatacaaatggttgccgtcagagcacagtccgtggctgagatctgcaaggtctaccgggtacctagcctggaaaacgtgcaggcctgtttgatgctcgacgttctcgaaggaggtgagtcgatacgtcacgtcaaagggctatctcgggagctgatcgccaggatatgtcttcgtgtaggcaacatcaatgtaccgaatggtaagttgcaccagtcgttgaggtaccggactcgagtaaataaccatttctctgtagactacgtgggaatgtggggcaaggttgcttgtacacacctggtcaatctacgctatcacaaacgagaggttttacaggccatggagtcgaaacggagagcatctgtcgcattcaccttctggatgacatgttgggcggatggagcgtcagccgctttctacgggtacaagccacaattgtaggtcgttccgggcggagcagaggtttgctcatctggctgagtgtgcttcatcgccgatcgctagactggaaggggattgggacgtcgagccggaacaagcatggagtgcggcttcggagagcagtctgaatccgatgtccaggttggaggatgtgagttggttgcgggccaagaatcgggtgctcactgctgactctggttcacgtactttacagttcctggtgtgtggctgtgcgcagatgctggagagagcgcaagctcgagctgatttgtcgctatttcgtagctttggagcgactcgaataccggcctctgtcgagtgtcacgaagcatggcaacgtatctctggcaaccagggaacgagacgcaaggaattcccttgagcaagatcaagcagactatccaattgttaacaaattggagagacgagtatctgacacgagttggggtgccgaccgtctggccagaaacatggaatttcattgcggctgtgacagcatgtcagtcgcgaacaatgcagtcctgtcgagtcgtggagcttatccgcttgctcacgaacaacaggcacggaggatgctgactatcacatccactggacatgtctcgctggggccataaaaaaatgcgggatcaaggagttgaagaggaatggcgaggctccgctagtcagggatgaagccgaggcgatcaaggcgaggatcgaacacgaggccatgcatggggcgttgcgaatatctgcgctcgctggagttctcacacagaacagctaccttcggcttgacccgtgagtgacggcgatcgtgatcatcaacgagtcggaacgtggcctgacgataccgtgcggtacgttcagcaacgtgctcttttcggctctttaccggagcggcgtctatcttgccgaagccggtcgtatcgagtgcatgtcttgcgtcgctggtcttcgacaatatggattgtgtttcgaggaagcctttgatcgcgcagacgagctcgctctgacttaccaacgggcctcaaatcctgcccttgtgccgaacgtcacctcgttgtcatcagtcccgcaacaagctctaggcattggtgtacccgcaagacacacacccaaggctcatcaacccgtcacctatccgttcgggcagatgacgctgcctgcaagtaatgtgggtcgcatcgaaatcgcttgccgagtttgacgatccgcaagctgatcgcatacggcatctcgagcaggactttgggtacggcgtgtcttcggaattaggcaacgggacggtatcacaagagttttacgggctggcagatcagcacggcatgaatcagatgttttacaacgagcggtgacgacaattgcgtcctcgaggcggcgcaaacatgacatgcatgccatatttccgccgactagattccggccggagcacgtcattccgatagccactttttcttgtcgagcgcgctgaaccacagcacggctccccatgccacggccattcctccgagtagactgacgacgattggctggagcaccctgataccaaaggcttgagacagagcgccagtggcaaacggcagcaatgcgctgccgacttggccgaggctgggtgcggaatgtatggtttgatcaggtcatacgaacgcgcttcacatcgagatccagtacgtacctctcgatccaacagatagcccctgctgctagggcccgagggatagccttgctggccaccgagagcatgatgggaaacatgggccctgtgcgccgacatgtcacaggtcagaatctgggagtgatggccggcccacgaccggtcaatcctcttaccaagacagagccccatgatcgagaccgagaccgcggtgccgacgaggtcgggcacgaaccagacgacaaattcgaggcccaaagcgacaagcgtgtagccaaagacgacccgtctctcaccgagtcgatcgtttaggcggataaagatcaatcgtccgactgtcaagcccgcccagaatcctaaagtcgtacatgcagaagggagatcaatgtgtcgtcccgcgatagatgttcgtgtcgaggtggtcctcaccggtcgaaacgtagcccgcgctttcactgtgctgtccgtcgttccggacctcttgtataaaggtcacgatccagctgtctcggtagcattccggtataagctcgcgtcgatggtgtgcacgtctgcccatacgtaccctccgatcgtgacctgtcggggcgagaacacgatagtagcgtcagcggcagtccgcgtccggtatcaagatctggcgacgccgtagtcgggaccgacctcgagtccgacgtagataaaagcccacagtgccagcatgtgtactgccttgacgcgcatgatctgattcatctttttcagtgtgtcggcgttcgagttgatgggtgtagcaggggcatgctcgtccgtcgctgctacttcgatcaggtccgggagcaggtcgtgctcgcgtttaccacgaaagacgacgccgacgatgacgagcgagatcgaggcgagaccgagcgagacgagatagtagagacgccagcgggtcgtgtagccggtgaattgcgtagcgatcagtggcgcacagagagctcccacccctaagtcgagtagatcggaatcagtcatttgcgctgtgaggtgcgagaatgcaaggcgactcgagatggccgctctcccaggactgaccgtaaaacgcctggaacaagcacattttgaggttctgcttggtgggtaatttcatgatgaatgccgctgccatgctgaggacaagtccggatccaaagcccgcgatcacaaaggctacacaaaatgcggggaatgggataggggtggccatgagtgtgtaggccgtcatctataggttgatatagtgcagttgatccatgcaggtgataagaggagacagtctcgactggcgctacgacatggggactcgcctgggctactgtgccgaccaagagaacctgtacaaacgtaggagggccagacggcatctcgtatgagcctcactcgatagtcaccgtcggctcagcccttctttgactcgccttgccgaatccaaacctatcttcgagccacacgttcagaccggcagcgatgaagaaccctgtgatgagacggtagcttcagtttccaaggggcaccggggcaaggctgggcttgacgactgaccgacacagatgctgacaaagatgagcgagacgatggtatagccgatgtggaaatattcttgcattctggggatcagcggaccgctagagatccccgttcagagtgcgaatcagtctggcgccgagtcaagccaggtcgagattcgtaacccacctcgaagcgtcgttccagccacacacgatcatgacccagaagagtgaggccaggtatcgtctttcgacactggtagacagcttgggggtggccacttggatatcgcccggatccgagtgatcagtagttccggaactctgcccagcatacctatgtgctagctccacatccgaaccggcctggatgtcgggtcgagacgagacattgcttggtgtgcgtttttgcggagggtacgtcggggactccatggtcggtaagcgagtcgtcgcaagtgtcggtcgtcgcagataatggccgacgatgtcgagattgagcagcagcacgcagatccggttgaatgggctgtactttgtgagctgaccggtttataacgtctttgcgattggtgaccctcggtcattctccggaaagatatgtaattatattcgtatgactagcgcgcgcggagagggcgccgcaccctactcgctcaccttgatcgccatcgccgaccgagaccgtgagccgatagccgcgatggcgatggcgatggcgatggcgatggcgatgacccctgttaaaaggccaccatggctaaacaagatgctcgatggaacacgcagctacttgcattgcctgcaacatgagtgacagtgctgactgacagacagaaacctgcttaccgaggttggcaaggcggaagcaggccgcaccgaaagcgatcaagtacaaagcaggtaatcggccaagtacctgccatgtcgaactgttgacctgccgtgtattacgcacatcgagtgcgcgctgatgcgccactttgggtccaggaatggaagaaagtcgcatcccgagggcaaagggaataggcggtcccaccagtgactcgaacgcgacacccccatgcgcatgaagggggaaacactacgtccgaaagaaagacctgtcccagcggtgaaccaaacaccgcaccttcacgtcgtgagggaaaaagcactatatgaacatatgagcacagtatgatatggaaacttttatcacgttgtccggacatataacgaagaatgaaatgcgcgcaaaaaccgcaaaaagaaaggtcccaccagtgactcgaacactgcacccctcccaattgagttgcgataaccctaagggaggatcataacccctagaccagcgggacctgtatgtgtgaggttgctgtgcatatcataagttcttgaataaactcgttatgagttggcatcgttgtcatggtaccactttactcgagacaatacgaatgatattctggggatgatactccgcacccaatcaaaggtcgagtcgtcacgagaggaccgcccaagcgtggctcaccggcggaagacgctctgaggcccacaaaccttgcgcttagccacgcgtcgtctgtcttttactcgtgaatcacgcacttcgttccactgtcaatcgtctccacgatgggccatggtcacgcctgatggaataataagcagaattcagacatgacccagatacacgacgagacgcagagattacacaatggaaagacgagtccgtcgtaacaacagcttctagagatttggccatgtgcagaatataacggacgagagtattgccgctgggacatcgattgattgatcgttggagcgccgtgcgcgaatctcccagcgtggatcctgaacgacggtcagtctcttacagactggacctacagcacgagcgctgcaaggtattcgtaaagtccatcgacacaacgcccaaccctcaaaggaaatacgctccagtggcaccgcgttctcgagccataacatgcctgcccatttcgccctgcgcctcttcagggtctcgggacttgtgcgcgcacactcgaaccgacccgaaccctagcgaattcaacactcgtccctgtgagcatcataccatctggccgtaccctcgactgaccgggacgaacccaacatgctctcacgtcgcgtcgtcttcaatgagatctgactggactttcgggtgctctgtccacgtcgtcgtgaagaaggaaggcgtctgcagatccgatcgtctactttggttcaccctttagctgacgagatctccaacgggccagcctctcttcagattgatgcacattcgtagtgacgatcccgaccgaccttgttcgtccgtgacttaccctgcgatctcattttggtcccctcgtgcccatgcgtcgagatgtgactcgaacgacgtccagcgacccggcccatcatgcccctctcttccgcaacgtcaccgggacgtccagaaacccccactcgatctcggtgatgtcagcgtcagaaggaacgatgctgacaaggctggcggaaggccgggtaaggcttgacgctcggctgacccgacgcgtcgatgtatgtggctcgtatgtcgtgttcatgtttcactgctcccgtagtcgtccgaagtcgtgtgcacgctggaggtatgatcggattcgacacatggtctcgccaagaatttctgtactatgcgctctagctcatcatgtcgtcctcaaaaagttcctcgccttgatctctgccttgttactgtacgagcaagatagccttgggttagccagactcccacatctcgcaggggaatgaatccaagacgacaccggatagacgatgaggggagtcacacacctggatctcaactttcgcctctctgcctgtcgatcgaaaccctgcgcctttccctttccctttcctccttcgttctgcatcggcgtctccccgatggccatccccccctcggcgtccagctcggcagccttcttgcccgattgtgcctctgctagtgattcgtccgtcaatgtccagagccaggccgggtagtcttcatcgggcatggcgatcgggtcgggtttatctttgaggatggagaggtccttcatcaccgtccccgggggcatgatcgatggggctgaacgtttgagaagcagggtgtgagcggttagtcgatgatattctgtgctcgataggttctcatcctcgacgtcgtcgtcgtggtgtttgcttacaatgcttggctttccgtacgggtgctacgtctgattctggcatctttgccgagtacgctcgcgaggtgttgctgcagaccacacagcgagagacgatcgaccgtgatcgggtaaaaagtgaacgggtgatgaatgacatgatcgatgggggctaattgtaagccgtgtgtatgatgatggcagagtatacagagatgtgtgtgtgtgtgtgtgtgtgtgtgtgtgtgtgtgtgagtgtacatgtcgatatgactatacctagccgactctaacttgtcgctgctgtcaacttttgatcatccaatttcacgtgacgattcactcgaaagtcacctttcgacctcgagagcgagagatcgacttgcaacttggactcaaagtcaccatcatatccaaacatcaccatcgccaccaccaccaccaccatagcaccatcatctcatcatcgacatcgagagccaggctactagcctttcaaccacgatgccgtaccgatcgatcatcgcccgtccgttgtttgacaagaacagggctctcccgcgaatggcaagtttcccgcaaaactctctagtctataagaaaagtgcaggccggtactgatctccccgtcatcatcctcctcgtcggtgacagagctgggcacctgaaaacctgtacaacctgtggcaacgagtatcacccgatggaccgcttcgatcggagaccaatttcacacggacgagtctgaccctctttcaacaacgatggcgtgccaaacggctctcgagaggttaccacggggatcacattgccgagcaaaagtttgaacgttggtacctccccgacgcactcccctcgatccacggctcgagtgtcggctcgggatcagcatcttcatcatcagcatcatcatcttcgacgaaatctcgagacttggccaagatggtagccggtcggacgagggagggcggacgggtcgagacggaacggtccaaggcgatcaaggagaaacagagcaggacgccgatcgggacgttgctctaccgggaagtcgagcgtcgattggacgtcttgatgttcagggcttgtttcgctacgagcgtgtggcaggcgagacagctcgtcgttcacaaaaaggtcaaggtcaacggagaggtcgtcaacaaccccaacgtacgactcaacccgggtgatctgttcagcgtcgagccgagcgctatgcccatgctctccaagcaggtagcagaccagaacaagaaacagaaacccactctcaagcccgcagccgacgtggaaagcgagaccgaatcctccgccgatccgaactcggaagcctcctcctcctcctcttcctcttccgacatgacccccacctcggacgaacccacctctacgccggtgggtatcgatttgatggttcgagtggtggggaatacaacgacgtgtacatgtttttcgcaatgtggcgcgagacatcagacggtgagggtcacaaggggcggaacgtagatcagctacagtatataaaaggcggtctccagcgagtcgaggcgagccgagtcgggatcagcgggcgaaaggggtaggaggggagtaattcacctgtgcttgacgtccggtccgcggcctgttctccctctcgccgccgttctggcatctgctgctaggggcgatcgaagcggatcttccaccacctcgacgaccctgacgagccctgcccgatccgccccacaagtcccagtcatacccgtcccgaggccgagatcgagatcgacaccgaccatccccacccccgggatcgtctggtacccctcgctctcccccgctcgaccgtgccacaacctcgcgctcaaccaagcaccgacagactcgccgggcaagggtcggatggtctcgacgaggtgctccgtgatcaagcccgagacgggtgaaaaggtgtacaacgacgaggtctgccatgatgtaggctacgaacgatagggttcgatgggtcagtcgcgcccagtcgaaggggatccactctatagcctcgtaaagaggtaagatcggagacgcacctctctctgtacgcccagacgggacagaccgcagacttcgaggacgaccctgacctgcttcttcctcggtgatccagcgccggccttattcgtccgcgctcgtcccggcggttcttcctgggtcgaagcgggcgacgaggccgtaggagagacggcgagcttgtgtaaagaggcgtggaggtcggtatggagcgctgtaaaaaaggaaaggacgacgtcgaggtcggataagcgtgtcgagacaaaggaagcgcggaaattggcgaccgaggcgacttgccatgcatgccgtgtcgagccagggcgaacgtcaggctgtacagcgacaacgacgagatctgacaaagcgccaacaccgtgtatctcgtagtcagaaagagcgtcctctgtgtcctccataccacgccgggactgaccttgagcggcaacggcgcgggtaaccggaggctgacctgattgctatacacgctcggcgggaacatctctctcggcgggtccgcgtcgaacagatgaggcagggtcgtacgtagatgcaggatccccgaccctgtatcccgatagccatgagtgaaccgggttctgtgagcatgcgggactcgtttgcagcgaagactgatcgagcgactgaccgacccggagtgaccattcctgatcgtccaccaattcctcgtcaccctgcctgacaggcctcttacccttgcccgtgtcccgggttctatctactttgggaccatctcgctgatcctgacgaaaatccgagttgggttggaagaatgggctcggttggtggtcattgcggctgaggaggagcgagagaggaggtagccgagtggtcgaggatgacgctacggtggcggtggtaagagatgaccagagtcgtgatggctgcatggacaatggcatcgtagtggtttgctcaaagtgaccgagtgaccgagtggtggtacgggttgcaccatgacatgaatgactgatcatacactccagatgccagatgtctccctcgcttatgaccagttgatctgaatttcggagcgagccggttgcgggggatgatgtttgatgacgagagcgcgagcgagcgagcaagagagagagagatggggggagatgatcacgtgatggaatgacatgggagcactgccttaccttacctgcatacatccatctacctatcgacaactgcaatggctcaatggtacatcgaccctgactatcacacagcacttgtatcgaacactcggctcattcattcgacgcacaatgtatcacctcctgaccggattatacgaacacttgaccagaaaggacgagtactcggtcgtcatcattgggctagataatgtgggtcatcgagagatcgtctcgggtcgccaacatgtgccgatccattgatcccctctgatgctgtcatctcacgcctccgaataacaggccggcaagactgtaagttcagtgctctctctgtgtaccacaacatcaaggtcgcgtcagctaacatgttcatatcccccgtggacctcgtcacagaccatgctcgaaaagatcaagacgctgtacaaccctatccccggaatgccggctgacaagatcggaccgaccgtcggacagaacagcaagtctcccacaaaccatctcccaagtgcacgtgcacctttgatcacgcccaggctgacccgtaggaacccgcgccgtcatcctctcggcgctgcgtacagtcggcaagatttcccttccttcgaccacgctccactttttcgacctaggcggtcaaagggatatccgacagatctgggaaaagtattacgacgagtgtcatgccgtcgtctttgtcgtcgatgcgggggatcaaggcaggctgagcgaatgctgggaagtctttggtcagtccagttcacacctcgtggtccgctcggtcagccgagccgggaacaaagacgactttggagcatatcgagctgaatatcaatcccttcgattgggtgcatcggatcgggcagacacggtcttgacttccccgagattattgaacctacccctcttgctcctcgccaacaagcaagacacgccgacctcgctctcccccgccgaggtgcgtgaatcgttcgacgcctggcaccgagcgaggtcggaatccgatcgagacgacgcgtcgaacctcgatccgaggcaggaatctgacggtcaagcctcgggcggggggcatccggtggaaaagcctgggagatcgtccgactttgatggggcaaaggccgaaaggatggccagtctggacgtcctcggcgtgagcgcattgacgggggacggggtcaaggacgccgtcacctggttgtacgcgcgggtcagggatgccagacggatgtgagtcgtccatatacgcgctttgcgatgtgagtgagagtgttcgagctgatgtgagggtttcttgtgacgcttgcagaggtgatcgggattgaaagcggacttggcgacacaagaccgggaaaatacgaaatgacaggggtatacggtatcgatggaaagacgcgtgcgcgcaagggcagcacaaggagctcgagccggctgcggcttggacaactggctatacaacttggagacatgaggtctacgtgctacccagcacgatccactctccctcggctgcttcgcccgccacaccctcgacctcgacgaggtacctcgatccggttcggctctgaccttgctgctccgagacggccattccaaacttctttttatacgcgggttcgctaccctgatgcgcatgcagctcgagcacgtgatgctgctccggcaagtcgtgtagcgaggaaggagatgaggtgacaagaaaggtcgacttgcctgtcgatcgggagagatcctgcaagtctgacgaaagggatcgtcgtcgtagtagcaggaagcgcgtaaagttctctatatgatgagacttttgcacggttagatgacatcacgatgaggagaacacctcggcatcaggacgtacctctgacgttctgtacgccctcggccacgacctctaattgatcttcgagacgttccataagcaccgacgagcagatcgcggcaccttccccacatagcctctggtcatcatcatgcgtgacgacagcggcgtcctgtgccgaatgaatgacctgaacggaaccgttggtccgggaggacgagggcacgggaatctttcgggaagcgaggaggatggctgcttgtgctgtggaggggaacgggatcctgcgggcttttgggcagtgttcatccaggtacttggcacattggcccagcgcctgtcatgtatcgacggtatcgttttcgtcagttcctggactttccggactgagtctcctcaatagatgttagtagacgcacctgctcatgactcccaacccactcgacgtcttccaaggcgacacctcgccgtacgaccaggttgtgctgcacagacagcttgtgcgaaccgacaacctcccattcgcttgcccctgtcgatcgaccatcctcagttcggtaggtctctggatgaatcaggttaagtagcgtctcttgaacgacgccttggatggtattcgagatgggcacgacggcgtaaggtgtagcggccttgaagacgtctgcaatcatgcatcatgcgaatgatgagctcgtgcggttcgatgtagcgcgctctttcaggtcaaggacggacggcgcacttacgcactcgttatcgtttgacatggaatgacctttgtatcgaccccggctaggatctgtagtgtggcctatcgagcgttcgttattattcagcttggacgggctgtaattgacccgaggagagtcgcgtctggctcaactcacgacgtggctgtaagaatcctccgggcccaagtatgatacctccatgatgacaggattcccgacgatctgtaacctgccgtaagtggttgtgtgatgactgtgaatgtgggttgttcgagggactgattagataggtatggtatgactcacttgacctgccaagtagttgcatgtgggtagagggtgagtgcgcgcttctaattggcgcgcattcaggtcaaacccagagcaaaaggcagcggggacaaggggtttagggtgacatgaacatcacgagtaatcattcatccatcatcatcatatcatctctctgagaacgagtctctatcagatacactcatcctcgtacaagacagaccagacatagacaaacacatctcgcaatcatgtcggcagacgcaccacctcctgaggagcccatgttcgctggattgaagaaaaagtcgaagaaggccaaggtcaactttgacgagatcgacctcgagggtggtgaagacaaggcggtcaccccggccaatgtcgccaccgagacgatcgcacaggccgaggagcagttggatgctggagaagcgcccgtagcggccgaggaggacatgtttgccgacctcaagaagaagcccaagaagaagaagaaggagatccctatggatttggtgcgtcgtggctccgcttgtgctgttggtgatgagagggatcgatgctgatgcagcccgccctcgtcttccttgctacgcgcatctcaacactcgcttcaatcgtcgatcgtcgtctgcacccaattcataggaagagctcgcgacccccgagggtgagaccgtcacccctgccgagtctgccgacgtcgacatgggcgagtttggagacatcaagaagaagaagaagtctagcaagaagaaggccgctttcgacctcgaggcgttcgaaaaggaggtgagtcgccggcgtgcgcgatctcgatgtccgcctccgtctgctctacccgttgacgctgatcgcgatcgccaccgtcatctgtatcaacgctagatcggagaggccgaggccaacgaggacggagagggtgacgacaatgttcccgaaggagaactcggcgacgacatctttgcctcgggcaccgacgccgctccttcctcttccaagatcggcgaggaagcctgggttggaaccagccgggactacacttaccctgaactcctcaaccgattctactctttgctccactcgcacaaccccgagctcgctggtgacaagaagaagctcactttggtcccgccccaggtgaccagggagggaacgaagaagaccatgttcgccaacctggccgagatctgccgaaggatgcacaggcagcccaagcatctgatggagttcttgttcgccgaattgggaacgagcggaagtgtggatgctcagcagaggttgatcatcaagggaaggtacacgcagaagagtatggaaaacgtcctcaggcggtatatcggtgagtggtcgagggtccgccggtcatgaaaggtcgttgggcacgacgctgacttctaaatccccgctcttgtgtgcacacagtcgagtatgtcgtttgcaagacttgcaagtcgcccgacactctcctaaacaaggagaaccgtctgtactttatcacatgcgagtcgtgtggttcccgtgagtttgaccgcgtgactattctccgatcagtggcaacgcgtgtactgacccgtgtgggttcttcctgtctcgcaggacgatcggtcgcggccatcaagaccggtttccaggcccaggtcggacgaagaaagctcatggcggcctaggaccattcatcccgcactcgttaacgcctcacgtttcttctggttcgccgcgccgtgtgtctgatctgatatgcagaaatgtcagcaatactgccttgtatcacgtatcacatgatgccgctttcgccttgtcgcttgtgaatgtccggatcatcgactgctgcgagatgccactcatgccccggaatctccttcatgatccgtcggggaacgtcaggctatttgcgaaactcgatttgcttccgcaaaacaacttccggtcgatcaagcacttgctcgcagcccaaaggccatactcagtagttcttcatgtcgtaaggcgttctccgtcctactctacatcaggcaaagggttttgcatagacgcagggattgaatcttccagcttcaaagacccccggccgtgacgccgccagaaaatacgccgaagatgtcttcgcatccccgtacgagccagccaatatcggatgcccgagatcatggtcggcgaagcgaatcgagtgaggactcagggtcaagactggtgcaatgatatatcgcagcagatggatctaaatgatattacttcgatttggtattgcagtgcaatcggactttggggaatcctcatctcacaatctgaaacgtccttcggtagatggtacgcaggtaagctggctagctccgggatctctaccaacgccgaccttgcgtctgatacccttcgcgggtcggtaatatcaggcgtcctctaggaaaaagtccaaggtcgttacggcctgtacccagtgtatcaagcggaaatcacgttgcgagcttgttaccgaggccgggtgccatcgatgcgtcgtcttgcagaccgaatgttctctccgtgggacagtccctgttgcgggaccttcacattcggtcccccagtctgtgcttggtgaatcgccggaccagtctggagtagagttaggctcccgcctggatcggatagaggatcgtctggagcgactactggatcggaaggaacatagctatattcaacctggtccggagcgtgcagatgtgatcgattggaacacgatcgcaccggactataatgcgaccggttcgctggcttcgcacgcgttcaaagtgatgggtcgtcctaggctgagtttcgaggatccagtcgcttcggggattgtcagtccgatcgagctgagatgcattcatgaaaagtaggtaaaccgacaggtttcgtgacgagtcgccgccgtggctgtgcagagctgatgcgtcgcgccctgaacagattcgtttccatatgcgacgacatctatcatgtcactcaactgggcatctcaaatacatctccaccggcggacctgtttgtgcagacctgcatgctctactgcgtcgcctgcgtgaaagactcgacgttcccgatgcctcgggaacaacggcactcgatatacgccctcatggaccgacaatatgtgatcatgatacgcgcagatccgtccagagatctcgcactcggcctgctgatcttgtcattctcgcccttgccacaactcgaacacaacgtcatctatgcggatcccttccggtccgccgtgttggcatacaacatggcggcggatttgggattggaagagtcaatgagaaagctcaggtcgcttcggccaacagagatcacatggaatttttacgaaaagcttctcagggatttagggctggtgagttgcgaggtggagaggatgtgcgcacgagatggtgcactgatgccaatgacacgccttgcagtggtactcgattttccaccggtacatctggtgagtctcgcccaatgtcaagcttgcaaggagccttccgagtgctgagaaatgcttgccatgtaatcaggagcaagatcgtcggcagtccaaatctcgagggcggtagggtctccctggctttctattcgatggctcccttcaccaccgactttatccaatcatcaagcctgctggtacatctctggctcgaatcggagctactcgactgctctacggcaccggtgcgtgcatgcgggaggatgcgagtggaagagcaattccatcagcatttgctggacgactatgccacggatctggaacgggcggaagcgaggatcatagagagcaggcggaccattcacaatacgcctcgacgtgagtcgagtagatggttcttgaacgataaagctgtctgctcggaaactgacctcgcaagctttttctagtccggtctatgggtcatctagcgctcgaatcgtatcacctcgcctacgccttggcgatgcagggatcaaccgaggcccggaacatgcctaccccgctcgcggctcaattgcgtttcgactgtctggtgcgattcggatctaaaatgatccgccatatgggcgattatctttggcatatcatcatgtcaagaccggacatgtccacgctgccggtgcacttttcgccaccgatataccttggactcgcaacgatacaagggtgggacctcgcctcggcgctacatcatcctcagcgtccggctgtacctttggatgtccagtccatctatcagatcctgcttgaagatcaagtatcgtcgcccaatattgtcgcccggatcaagctcattccgaggtatcgcctcgacactcgaccggtacagcgacccgaaaacatgccgctgtccgaaggcggtgaagagaagcgaagcgacggcgggtcacagtgggcaaatgctatggcggatagtatcgcgccacaatctatgcatgctctagacccgtacgctagcgacatgtcttggttgcttgatttcgagaccgattggatggctcttgtgaatggtcgcgtcgggggaatatgaagagggatttgctgccaagccgggccgccgagaaccagcataagcattcaaacgtagctgccgaaacatgtctttccgtataatgagattttgcattgccgatagactgatatctgggcgcacatcggtcaggtcgtccttcagctatgcatgtatcgatggacccttgtcgactcggcttgatcacccctttgtcactgtctccgccgtgatacatcctggcgatcgaaagggcgtcttgcgcctaggttcggtgcagtcacgagctttagcgcctttgcgctggttcatgcgtcgagcgcgtattctgcgaatgccactcctctgtaaatgcgaacaagctgttcggaaccggtccaagccgggtaattactggttgagcgacggatgtagcgcatcgtttgcgaccggacatcactctgctggtcagaccatccctacaggcgtcgtaccctgatttagagcctgggccatactgtaggcgcgaatttgtttcgcgcgcagcgatcatcctacacaggtatcgtctggcagatctaggtctgaatgagacggaactcgaggccatgaaatccagtcggaagcgatgtcgaggcgacgcaacggcgttgtacaccgggctaggcgcgtcttacaacgcaaaacaggcgcgacattgcaggccgctttgagcatcgaccatgtacactatcgcccacaagcttacttcgtgcggtagagaagagactgaagaacattatcgtactatttgaatcatctagaactcgacatcgaacgagaaacaaaaaagaccgcgccgagggcaaaaatctaactctgactagagccggactcgaaccgacgcggcaattacgccatgggaatacgacctgtaatcaggtaagctttcgcttgagtcacacgccttaaccactcggccatctagccagatgtgaaagatcaggttacacaatatttaagtataacaattttgtaagaggatatcgcctcccggatatcgttggttccacacgcgcgcactgaccggatgtagtttagatccctcggctagtagttgtggctgtagggcggagttgtcaacctttctaactgcgtgagcaccgatgcggtgtgtcgctatgaccggtcgctcgttacatctgtactattttacttctgactgtctagatccatgtgttcccgttcaacagcaataccgatgatgggtcgggccagatacaggccgaggagagatacgcaaggatgtagttgaccatgcgcatgactcgtacgtggccataacgtgcgtttggacggatgacgtcgtgttacgccaacagagaagactgtgtcgtgtggcccaccatcaattgtctggcgactctcatgaccggcaaacttgcggtccttcccgcgcacacctcggaacgacgacacgccgatgcattattataaatcggagtcccgccctaatcgttacaagtcatccacggacccgcctactttcccgcctctcgaatcacgtcactcccaccgccagcgctgacggcctctagcatgacgacgtcgcgtatcaggaaactgtaccaccctcgggcgataaggatcgtcgcgagatgccatagcgagtgtgcatccagtatcctgagaaatggcgggaaatcaaagagctcgagcgacatggctgctgtcgtcgccatgaccaggatggcgctcctcccgctccaagctggtttgggcgtgatgaacagcggatcgagtggcggatacggcgtgggtatgagcgaaaacggccagggtaatcgagtgcggaacgacatggagaacagcgaccatagcgagaggtgcgtcgctcccatcatcagattgaagagcacgttccagccgtagtcaaagcgcggacccgatagcaggtacgtgatgtgcgacacgtaggcaatgacaaagcaaatgaccaaggggagcagagccggggcgccccgtggccggtccgctcgagggaacaagtggaacgtgcggaccaacgtgtacagtagtgtgcacatgatggtcgctgtggccgaaaagtagtccatcttttccgtaaacggggtgtcttttcgcgaaaggcaaggttgtcagaaggatcattcgaccgcacccaggacacgacagactcaccccgtgtatgaaatatggcgctccaaaaccacgtgttcatctgaaacacggcgatcgccatgacccacttcttcaattgaacgtcctgcctgagcctattccagacctttcttaaacccttgtagtgaacccagccgttgcccagcgaaaagaggacactggcgggttcctgaattccaccaagtctccaaaacggccacttgccataatactgatgtacaacgggaagcatccccgaggtgaccgagtgcgtgcagtggtacgcacaatcacctcgacacgaccagcgaaatgctcgcaagatggcggcgagaggcggcgagtcgggtgtacactgcttcgagacgcattgttcaacgcacgattggaacgccggcagacggtccccggacgaggccgccaccattggcatcatcaggacgagaccgagtacgatgccgagcacgagactgggcgaggtcggggaagagtatggcgaggcccgacgcgaggctgtcgtcaggagcggggctcgagccgatgtcgtaggcgaggacggacgcggcgataggaggttgggatccagctcgtgacttcgcaacgtcttgtgactgctggctcgagattgcgggcgggaagcatagacaaaatcgtcgtgtccgtcttcaccgtgttcaccagcgtcggcgtcggcgtcaccatcctttggcgccgttactgacggtgtgccggcctcgtcggcgggtcgcttccctttgatcagcgaatcaacgaggcagaactgtagggtcgaaacaaccaggttcagatcggctcgatgctccaggcccagttgttttctcgtgatccgtgatcgttctgcggactcacctgaagtatgttcatgatcaaagggaagactgccatcacgacaatcacctggacatcctcgcccatccacccgatcaaccagcccgcgaacggcaaaagcaccttttcggcacaaaggtagaagaggacgatgacgccgatcttcatcagagtcagggacaatagatagatggctagttgtagaaagaacctagagtatatgacaagaactgatcagtctcgacagcccgttgactggttgccaagtactcacggcctgtatccaggaggatcgccgtagacgccgcttcgaaatcccggtttctgcccgaatatccgttcacatgtccaggtaaagcctcgaatggccaggtagagaaacaggacccctatagtagttgacttgtgagccgataaacgcagacgccgcaccgaggaggctcgggacccaccgatggtcgtgtcgatcaagacgttgagaaagtagaggctacacggattgatgtcgccctcgtgtgatgctactccagccgagatctattccaatcgtcaaatgttcagagaatttcccacgcagctcacgtcgatcgcacgacctctcggtgctcacccagacgttgaggaaatgcacgaacccctgtccgatcaactgcttgccgacgtccatcgaccagaccctccatctccgtctcgggatacctttcttggcgttcccttcgtattgccgcttgactactaatgacaagacgacaaagacacccatgcaaccttgaacgacgagggcgacgggtccgagcagttgacactttttctcggcatcttgaaatccggtgtgggagatcaacggcgagaggctcagccggctcgtcgatacggacgatgtcgaattgatgttggcgaggaccatgatgatacctcgggatcgagctggttggttgagaggtcgaggcacgatcggacgagacgcactcggtggtcacggatggcgatcccaaaagagggcaaggtaggcaggcaggcgatcaggtcggtcccgcgggcgatccccgaggcggtcgacgcgaaaacgtatattcgactttccttcgcctgtttcatttcgatgccggcattcggccgtggtccatcgattattcaagttgataatatgatgcggtaaataggatcaacacgtacattctggaattccaaacctgattcgatcaagaggggtaagtgatggtggcaccaatcgctttgtctccagatcgttatccggaaatccgctccagacgatagccttcgggcgcagatgacactcctgatccctatgccgctcctcttcgaggttacgatcaccggagagaccagcacgatcagatctagccatcagcacgatgttcatcatagctgcatctgcagataaacatacgaaagcgttgattacaatactgatatggagcccaacatgtccgcgttatccatacttgtcagacgtttgcttgccgagattcggccggctgtgcagcggctatgtgatctacagtcacgtgccttcaatccgctcctatggacacagtgtcactgcaagtcctggagctctgctatctctgagctacatcttagcagtcgttcagtgcgagagtcttgaactcgacgtccacgaagcggggagaattctctgcatcaatgtgtcttgagcatgttatgcgcacgagaatccaaagtggagatatgacgatcccccgtgcaactccaggacgtcagactccccccccccctccctttggtctccttggcgtcatttcccccgattgttggagttcacacacagaggatacacgttgagacaggagagcgtagcggaattatggccttgccggatcgatgggacctcagcgggacatacgtctaaatatgcacgtcagggagactcggtcgaccttatgttccgagactcatcgactgctactgggtgcctaggcttgaagagctcggtcatcctcgatccctagggacgatagacgagcatctcggcgaaacgccgacgaccgcgccgccacgtaactccctcggcccaaatgataaaggatggtgtcaccgcaggttccaacacgcgatgccggcggataacgtcatcaaaatctttccctactggcgatctgatcggaggagatgtgagctggaatcgcagggcccacggcggttgctggttgacgtaaaaaccaaagcctccgccacacgcgtcagcgtttattcagatctgcaataggtcgcgaatcgtggggaatcacagagagggggagagttgggattcctgcaattgacctccacccgagtcgagtgacggacgacgttttgctgacctcggtcgtcgttcgcgttcgtcaccgactcggcaaacggcacagagagagagagacagagaggcagagagatcgaacgaggatcgggaaagcaatcacgagcagccacaccctcatcatcattgcgtgtgcaccgactgggtggcggaggttcccattttgaattcgtagacgtcactccaggtgtggttcgagcataagcaactcggagctcgcctcgatatacaatctgacgttcatcatccacgctcgttcgcaccatcccttcacccacctaccacttgcgacctactgtttgctcactgcctcttcggctattgcatgaacttgcgacggacattgtcgggagtttcgtcatctctagtaactcgatacctacaaacctctccgtcgacatcaatccgtcccgcagtcgaattcgccgaccacacctggctttcgacctatagtctcccggcatcttcgcgttcataccttaccatgaccactaccaccacagcgactgagcatgagcccagctcgacccggacgaccaactcgtccacgacctcttcccgccgagaatccatcgtcagctcgaccgactcgtccgccactgtcactggcagtaacggtctagatgataagcatggcgggacggacgggacgattccccccggcgaggtcatccaagccgagatcgcaagggcgagggaaatccccaagaccctcttgacgagcttgggagcatggtggaattcctcggaacagaccgccagggatagcgagacgaggttgctcaagtaggtcccgcgtccagctctttcgacatgaccgggggaactcgtgttgactcttgcatctccctgcgtgtctcgctaactccaggcgtatcccctttttccgcacccacctcgaaccggatgtccagcccaccccggacaaccctaaccccttgaccgcccggataactcaagtgcccctcaaggacaatgcgaggtcgagcaagaacggccgggtgatcaacatgtgttctttcttgaccccagagaccaagggcgggaaggaagccgtcgtgctcacccatgggtatggggcgggtttggcctttttctacaggaatctgcaggacatggccgagacgagcggtaagcacctgtatcctacgagagcgctctcgttcatctagctgcgagctgatcatggtcgtcttgttttctacgctcttgctggcttgctcggtcctcatgacctcagcttcggtgggaagagctgcgtatgcgatcgattggctaggcatgggcaggagctcgaggccagacccgaaagagctcgtctcgggtcgaaaagcgcccccgaaagagcgagtcgaaaaggtgagcccaggtccacccctggcgtctgcttaagccgatacgaaatgcgaccaagctgactttgaccttgatcgggggatggttgatcaggcggagaggttctttacggattcgctggacgaatggagggaaaagatggggatcgaaaagatgaccctcatcgggcacagcctcggaggctacatcgtctcggcatacgcgctgaaatatcctgtgagtgatccttgccctattgccttgccaacatttcgagtgcggttaaagtcgagctgacgaacttgtggtgctgcgtctacaggaacgggtcgacaggttgatcttgttgtctcccgctggaatcgtgaatcacccggaaaagggggaagatatcgtcccagacgccgaagtcatggacaatgagaccagggagtacatcgattcctcactggagaacccacataaacccaacccgagacgccctggaatctcctccgccccgaccgagtactcgatcaaccgtccgggtgtctcccgcgagagttcagcgcagtcggtcgactcgacgaatttcgaagcggacaaggaggcaaagaagggcaaccaaggctggtggaaaaaggccgtgtactacatgtgggaagaaggtgtcagtccgttcggattggtccgaaagctgggtccggtagggcccatgttggtggcgaaatactcgactaggagattcgccgctttgcctgaggaggatatcgccgatctgcatgaatacgtttggtcgtgagtcgaccgcaattctatatcattcagatccggtctgattcctattgtttgcatcctggctcgcagcctgacgagcgcaaggggtagctcggagtatgcgatcacccacctcttggctcccggagcacatgcaaggtggcccatagccgaccgggtacacaagctcaacattcccatcgcatttgtctatggcgaccacgattgtgagcgctctcgctgtgcgctcgtctgataaacagactgctgataaagacttatgatcagggatggacatcaagggtggatacgactcggtcgcctcgatgcgaagagccgggaacaaccacggcaaggtgatcgagatcagccacgccggggtaagtaaactcaagccgtgaggtccattgaaccatgactgacgacatttcttgtttccagcatcacgtctacctcgataatgcccgcaagaccaacgcagtgattcgcagcgagatcatcacggcagctcgacgttccaaggagcgtgccgagcgcgaacgagcgatggcagccgagacagcctaggctcgacgagcccctttctttctttactcttgttcacgatggagtaccgccctcccttaatgccgtaccgtttcccattttacccaggttgtacacgcgccaagtagctagataattcatgcatgtctcgttcattttcccaccgatgttcgccatctacaccgtcaacgtcgaacgcaatcctcgtacgaactcgttgacgttgcctccagattcggcaaacttgcccaacaagatctcgtccgtcactgcatggcgaatccgagatcagctcgggacgatcatgtccaatcacgtcccagatctcacctccaaagacaaatttgcgctgctggcagagatccaggatccccctggcctcttgcagatcaagtcggtcgccaacatcgaacagctcgagtccccgtgcagcctcgacgtggtactgatccagcttgtcgtacggcgtgacgacgggcgccttgcttagctggggaacggccgcgtaaatctcctttggcggcgcgtgttgagcggtcgacagggagatcgaagttaggatggcgccatggtcgaacgatttacggcccgagacgtagtcgagcaagagtcgaggaagggagagggcataactctcgaggtgttcgaaatggggcgttcggtagctcgaccgcatgaaaagcgcctgggcttcgtcgatagcgagaagaacaggtgatctgcgacagggcacgcgaagttcagaaaggagccaggtcgaatgaagcgggctttaactcactgagtctgcttcgacaagacttcgaggacgatctcgaggacgccgaccgagatggtctcgtccttggcggcgcggaccatcagggcatctagcttttcatctccagcaaatttctgaccagtcgcggtctcgtactctttttcgagcgaaatgcccgacaatgccttcttgttggcagtcaaaatggaactcaacaggctcgctgagagtgccggctggtggaaagtctgggtcgaggcgttgtaagcgtatggcgacgtagagtcgatgagttcggttgctcgggggaggtagatgacgatccagtttttctgccaagcagcgctcatcgcctggagcatgatcgtgctctttcccgaacccttggaaccgttcaagagcagtcgggtctccctgctgggcttgtcggcagccgagctgagcctgttaatgagcttgttgctagatgtccgtgtgacagtggcggcttgacccttttggaactgtccaaagcaaggcaagtgcctttagtctctgtggacggttgcgaaatatcggtactgcaaagggtgaatccctacctcctgggcgattcttcggggcagcccgtaagcttgcagttggtcaacattttgcttcttgaagcgggtaggtacaccggcctgcatcgctacagtctgggtgtcgtgattcattcgaagcaagaacaggtcagcacgatggagccaacagctcgtttgttacggaagccaactcacgggctcaaattctgctgccaccgactcggtcagatcgacctggttggactgagtctcactacctcgagaccctcctgatgaagcctacatggccgattaatgttggttcagcgcctgtctggtttgcacctcgaatttggtttctgctcacctctcccttgcccttgacggccgtgtttcggaccttgctgaacgagccgggttttttcttggttacgggggctttacctgtagctggtaatcagtatgtatcctatctctgtgggtgagtgagtttgaggacctaccaggcttcttgccctttgcagcggccaagttggaagccgaggtcgaaaacgcagcgaccgcgatggtggacggctgggccgctacgagacgagagctcgaggcgatacatcggttgtaaaaagcagccatattgagcttgacgatcaagtctgattgtcaacttatgtgaagatgctgcaccttgatatggggtttatcgagatgctattgaatttccattgaaagacccgatcttgagcctccttcctgactttccgacctgtagaggatggatgattaacggacatcatatcgaattcatttgatctatttgtgatgtccgcttaccacaatctcgatcgcgtcgcgtgaacagcgagcagttagcagctcgatcaagaccggcttgacctcgatggcttcgattttgctaagattatcgagtagaaggactgctcagttctcttagaacagctctggaccatcagcaagggccggcggatagtcaaatcaagatgccaaccgacaagagctccaagcgcaaggccaagagggacccggacgaatcgggggatgatgacgatttcgagatcaaggtaagctctcattgttcagcttgatagcaggtcactgagctgaccattgctgtgacacagcccaagatcaaaaagtccgagtcggatgacgagtcggaggaggaagtgaaacccaaaaagaaggctaaaaaggaggccgtcagcgatgaacacgaggatgaggcggtccctgctcctgcagcgaaatcgaaaacggctcctcgggctgccgccgggcaagccggtgacgaattgatcgacgaggacggtcggccttatttcttggtatcagataagaagagagttacgctctcagaattcaaggggaagcagtacgtcaatataagagaggtgaggaacgtcgcggctcgaatgatcggtgttcatcatgcttagatgcgctcgctgcttctagtactacacggacaaggcggacggcaaagataagccgggcaagaagggaatcacgctggatcttgatcaggtgagtctccaccgtcctcgctggaaagcaatccaccgaatactgagctgcgaaacacctttgcagtggaagctcttcaagaccaagatcggcaccgtagacgactggatcgcctcgagcgggtcgagtaagggaaagaaggggaagaagtgatgatgttcgctagtccggatcggttcgtatatcaatcactgtatcgtcatctaaagaaaagaagtgtataacagaaggagcatttgtcttggctttcggaccgagaagattcgtcaccgagactttcgcgacaatttactaccagaacgcctcacccatagtgcgactgaccggcacaagctaatcatgtcggcgtgattgtaaagcaggagaggacattcctcgcactgtggacatagctccaccttggctcgccagatttacgatccgccggcaggccgttcaggcttggcgactcctcttatcgcagggtccgctgctgcaggcacggatggacaaggttccgagcctgaggattcgcatatctcaaatacaaactcctcaagacgagtccagcatgctgttgcttcaagacctgttcgataaggtggagcaggaacggcatcgactccgggagaccacttggatgaacgaattcctcctcccaaagaagaagtcgtaccaaaaaggaactcttctgcgctgtattctttcgccgatgggaacttgaggaagcgtcccttaggacaggctaggctgtatgttatgcgaggtttaagcagcatgtgtctggatggtcgtgacgcacatccagctcctctcgacttcgactgggtcctatgcggtagtgtcagaatggcgaccagaagagcttacgtccgccaaggtagccgtacgcttgttactgggtttcctcagcgagaggttcttgcgaggtgatcatgccgcggtaaaacgtttcaactggaatagctgctcgaggagtattccaacaaacagccatgctcgtcggaagttgccatcgtagaggtccagactccttgactgcccagcttgtcgatccggtctctccatttgcacttccttccacaaatttcgactgagctagtgcgctcgaatgatcgggcagatctaccgaagataatcttgagaaatgttcgttgcgatgcttgaatccaaccacgccttgtcggtccgcctgtccgagttgcgaagtagtggtatatcgcccatctgcagggtgaacccgttcgggtgaaagctcgactggtaaccgggcagattcagtgtccttactgtctagctgcgcatacttcttccctgatatcggatggacacggtcactgtgacaagcccgtcctcaccgtcgtctactgtgcaatagccgagacggattgcgatattgcaggcctgtccgatgattaccgggctttccaatttcttcttggtgatcccggttcgtggtggttgtcttgaaccgcgctgggatcgttcgatcttccgtggaccactactaatgcgatctcttccggggaaatcccttgcaacacctcgatcgaatcatcgggcatttcgggggcagaatttcgtctagatcgttccccaaagaggtactaaatgcatttggattgcaggtaattgcgtagaacattgaagccgacggtcacagtcgaggcaaccgttccagatcttggtcatccaaagcattggatcggggcctaaattccgtaccggccgaaacacgaatccgtctggccggcgggtacagagctagttagaggcgacccggagaaaagatcaccaaaaacctagaggcgacccggagaaaagatcaccaaaaaccttggttgcacgtgtgatcatacggaagattggtgcatctctctacgagtaacgccatcgacgtggttgcttaccgctaacggtgcagctactgcgagcattcctttcctgccgactgcgtcatcgttggtcactcgatacgtcagcaaatagtccgcctcagcacaatgccgtggccggcgggccctggtgtccagagtattttcgcacctatcccatgggcctgcgggaaccctaccagctatcggcaagtatccccacgattcccacatttcgagcatcgtcatacagttgatttaccgagatctcgatcgatgcgagcccaaaggagcgatcaacacgaaactagcgcgcgatcggaggctattgggcttttgctgatgaaagcaagggtggcgttcaatggagaatctaggaattctaggaatgcagggaaaggatataagagctcagcttcttgcatcgacccaggtcagagtacagctggtagaagttgggtaaatcctcgattcaacctatcatcgattcacaaaatgttgtcgaagaccctccttgctttcgctacggctgctaccgctgtcttggccgcccccggccctttggcacctcctaagccattgggcggagccaacgttaccgccagctcgccccctcccgagtacaagcccatgtcggattttgacttccaatcgctcaacttggcattgaaccaagaatggatcgagttggatctgttcaactatgggctcgccaggttcagcgacgccgagttcgacgcccaaggcatcgacgccgagcagcgtcacttgctgcgcttcatggcacagcaggagatcggacacgctaccctcatctccaacatcttgcagggtgccggtgagtgcctttgcgtggaaacatatggccttgaaccgctgtactaactaactacaactcaatttgcaggtgccaagcaatgcacttacagctacaactttgagaccgttcaggagttcatccagttctgcgccattctcacccgtttcggagagtccggtgtctacggtttcctgcccaagctcgactcccgacccgccgctcagctcttgctgcagtcgatttcgaccgaggcgcgacaacagcaggtcttccgtcaattcgctggagccttccccatgcctgtctccttcgaggctggaatctcccagagcatggcctggaccctccttagcccgtaagtcgtagacgcgcgtgaacccgaacccgactggatgcgtactgatccaagtatcgcacctgcagttacttggtctcttgccctgctgagaaccccaggatcgagtgggctaggttccctgacctcgtcatcaacaacaaccccaacctcaccgctgagggagtcccttcggccgtctcgaccaaccgaaccgcttttgtcacccccaacgttacccagctcgagatcacctacgacgctcccggccagaacgtttcttacaacagctcctacaccaccgtcttgggaagcaacgtcactcagaccgagaacttgacatgcgtcttcgtggcacagcttaatgccacgtctgtaccgtttgtgcggaccggaaacaattcaggaagctgccttatccctgccggacaggtctacgagggcgtttacgacaatcccttgttgaacggatcgaatttcgttatgcttgttgagtcccctgcgccctatgtcaccccctacaacttgaggtaagttatcggaccgcaaagagtaactttcgagatgtgacgctaatcttgaccggtttttcgctgtagccttctcgatgacatcatcgttgctggacctcaggtcgtcgtctttggttagaccaagagcccacctcagcttgacgacctattctgcaagcgcttttgcttagcgtttggcaacggactcgcaaatactttgacctcgggatatggactcttctagtagctcatatttccagcaactcttcataatcgccgcctgttttacacgtatgaaatgtatccatcacaaaatcattcagtttttatggccgcggctgatcctgttagtctcctcggtcttcgcttgttgatagtgtgcgcgatgcgacttgatggtgttagtctctttactcggtctccgctcattgggtgggtgagcaagggtcgactgcgcgaagtatgagcaggttgagaggttcgcataccgatatccaacgcgtgcgcaacttaaggtttgctcgcttgcttccgcaggccgcgaggtcaggccgttccgcttctcatcgggacagagtatttcggcgatcgtgtcgggtacacaacccggccagaggaatggagacctctgtagtctcaggtgtgatgtaaccgaactcgaaccatgaacgatgaccagtcgatgctgaccaaaaggatctcgtcaaggatccatcggcaaagaaaagatccaacaagagcctgtgcagcgaatgacatcgcaagctcaaatgcgacctcctttagtagcggatctgtatagctataccggctcccttacacctgcaatggccagctttgtgcggaccgcaatttgcgggctgtgactatgagacttcaatagcctaccgatgaagcggaggacacgggcggtttccatcaggtgcgaagccgggatgagatgataggatggatcaatttctgaggcaaagagcaggtcagctagtcatgacatgagcttggcagcctgtgcctacgcactgtctagcactcgaatcggatctccttgctgaagtgacatacataccctactggcaaggacgatcctctgatagttgcaggactgcttatccgaccgaaccttctgaagggctcggctgtttggtcgaccccaacacggtcgactagatcgctctggcactacattggaagacagatatccggatgcattagggaactacaaaccaaagtctccatcatcccattcgatcccattgctcctcgtcccgctcgttcagatcatcccttccggctgaatagccgacctgacccttgccagtcccgaaaaccccttgtcttgttgtttgctgaccttccaactctgtcccggcatcgaaaaaggtcgtagatccctccgttgcaccggtcgagacctgcgaatagccgtgcccgcctctagctcctcgcatatgtccctctgcataggcctcctcatcgtccaggtcgaggtcgatcgcccctgctcgagcctgagagagatcgatcggcttgggtgggcggaaaagggaatgtcctgacctgttgaggatcgttcctagtctccagaattggacaccatttcgcacgaccagcagcagggtgtctagcacctcctcacctgcatgcacgggaaacggcacaatttcagctgcaggagcagaccaatagcgatctcgtgtgatcccggactcacgcttagaaccggctccacatggattgaggaatacgacgatcaaggtgatgatacagaacgccgtgaggaatagatcaagcacgttgagcggggtcaacggatattgctaccagatcaaagggaaccgaatgagctcaagtacgtggtgaaggggaatgtcgacataccttgccaaagccgacccatcgagttccgacctccaggaccataccgccgttgacgataatttccaagatatgccaagtcgtagacggacacccacctgaagcacaaacagcaatacttcaccgattagctccggcacgacctgactcctcatgctaccgaacttgccttccagcaaactgagtatgactgtgcccaagctcaatccggtcatcaccaagtagaaaatgatgtagtagcgggagaacatgatcctattggcgacccctcgcatacgttccgaagtcgtcatacggtaaggcgagcgagaattgctgtgaagagacgtcacacgtctaaactttagcgagggactcgatgacggctgtcgatacctcccagactcacgttcctgatccactcataccttctctcatcaaccctcctgattcaccagccaacgtagatctctccagggcctcgatctcatcgtccaacctgtccgcatcgtattcgtcgtgcccatcccgttccatcgagtctcttcgatcgtcagcgagctggggtgattgagtactcgcagagcgatcgaatctcgtatctgacatctcgacagctgttcgagcaggtgtagattgtgatctcgtgattgacctaatcgcttgctttacaagacagcagaggatacagcgttgtgttatcacggaacgaagggcagccgaaggtacatgtcaaggtcaggtttcggagacaaaaaggtccccgggggcaaaaaacatgcaacagccagacattcttaaactgctggaccggtcgaggacggccaaatccattacgtatcgggactgctccaatccgaaacaagtaccaaagacgagttgcctcgggcgtaagtaggacgatgaaaatgccatgacgtgacggctcgactctagattctggcagcgttaccgaagcggaaagtacctactacctcaaggtttgggacggccatttggtacgaatgatcttgggaaacttgaggctgggcgacattttaccaaggaaacagtagcgaccgaacctttcccactgctctgcggctaggttttggttagtcagacgacagcgcgacggcgagggaggacggtgttcccgccgagaggatacgtttcctggttcttcgaaagattaaccagtgacatcctgtgatcttagtcaggggtaccgatatcattgctgaggaagtgaagagcttcgtgtagcttagctcgtcgcactttctgcggggattgggtgaccagcatcatccccgacgacccgcttaggcgatgcaaatgccttggcccggcctggttcacgtcgagctggccggagagacatttggatattccaggatgatcattgatgtatcgtgagatgtattttacaggtgtgaatgcgaggatctatgggtgctttgcgaggatcttcagtcgagactgatgtaagttcgtgaactgatcagcggtccgaccaaaacggcgacatcggttacacttaccttctgttgagtttcggtactttcccctcctcaagacctcacgcttcctggcgccttccctacgacctcccaacctctcttttctccgttcttgccttgcctcgttacgaccctcaagccttcctcctcggtcacgttcctgacgtctacgagctccttaacggccaagatctgaccggcgacgtcggaggagaacggatggagtacggatcggtgcagcttcttgcccagacccagagcatccagcgtccccgaggtttgtttggggagtccgatcgatgatcgtttgagcgtgataaggaagtgcgaaggctccgatgatgaggaaacagaggtagcatcgagtggcgagccggatgaagatgaagcggcggacgaagcctgagaggacgccgatggcggggcggtgttcaggtcgagagcctgatcggcactgaagcaccgaatgaaggatgtccgtgtggctccggtcaaggtggttcgcattgcctgtcgagcgggaaggaaggagcggtgcagcgacatttttgccaggagtacgatgcctatgtatctgaaactctcttttgagttgttatgtaagcgtatagctgaatagcccaacatttgagctggtgttataggagaagcaatcgaatatatatcccaattccaagattcaggaaagtcgggtacggtaacgaattttgcttccgcgatgcgagcagcatccagcagcgatcaggtcattatcgaccatagatctatctagcagcaactgcctcgagtcgtaccagtcatcaggactacttcatactaagaccctgagattctgtgggccgaaccgttgccggcatggacgacctattggatctgaacttttcggcgctcacgcaggccaagccgacttcgtcagggaactttcctaagcctctgctcaacccgacatcatcaacgagctcgaacggcaactctgcgtcccgttctcagtcaccagcagctttcgatctctttgctgcgacagcatctagaccatcaggcctatcatctccggctttcggagctctcccaacccgaggacccacaccgtctcgtcttcaaccggcatctgctcccaaagctagcacgggcggacccgatgcattctccgacctactctcctcgttcggtccggcaagcgccggcggttcgagcgtgaactcgcgacctggtagtgggatgggaatgaatgccatgggttcgagcatgtcgggactcaccttggtcgagcgtcaagccaagttggcacgggaaaagaaagaaaaggaagaaaaggatcgtcaggctttcgactttgattcgtggggtttgggtacgagcacaggagggacagcaggctcgaggtcttcgccgattgttcctgatgttacatctatcgtagcgccaacaaaagctgcaaacgtgctgcagcccgtcccacgcaaagcagaggccccagtcaagggaaggagcatgcatgacgattggggattcgacgaccttctgggcagcagttctaagctccctcccgcaagtaaaacgcctattcaagcgtcctccagagtttcttcaactgtaccggctgatccatgggacctggatgcactggctagccagagtacacagcctcagggccgcggacgtgcggtaggccgtgatgaaccccgtacaaacgattattcggggcagaaggacgatgaagataatctgctgggtgacctcggccgaccggctctgaaaccacgagcagagcgtccacccatccctccgaaggtgagcacctgttccacctcgcgattccaatcattcgtcaatgtctagtgcctaacaatcctttcgtcactctcagctatccactcgtgctgcctcccctccacctcatatcgtgggccagatcgtcgagatggggttctcgcctgctcaggctcgatcagcgctctcaaagacttccacaggcgccgatgtcgaagcggcaattgccatgctggtaggcgagagcagcgggtcggctccaaatgcgcggtctcgagatgaagcaccgtcccgacatctagacgaggtcgatcaagaagagctggcgagagagcgccgtaggaggagacgacagggaccgacaagagcgaatcttgatgccgaggtcgacgagcgacctcgatcccgaaacacacgtccagatgatgaggctcagaattacggtgatgtctctgcgcaggccgacaagatcctggcgcaggcttcagaaatcggtatgagcgttttcagcaaagccaacagtctctggagccagggcaaagagagggcgcaaaagctttatgaggagagacaggctgctttcgcagccgccgagcgagccaatggcaacaaggcgaaagatggcgatgctcgaccgaggtggatgattgatgctgaagaggcacaggcggaaagacagcagcgtccaaaacctagcgaaaaaaaccaaactcgagccaactcgaactctttcaaagattctgatgacgaggatgaaggaccggaggaggctgtcgccaagaggcctcccccgccccgtatacgtcaaagaccacaattcaccgaagacagaggcggccccgcctctcgatcagctccggcgcccgagcctagcgtcggtgatctctttggcgaatcggccccggtatacaagtcggctggcaggcacaagctcactgcttcccccgcaccggcttcttccgctactccgagccgtcctgcaccatcgcgctctcctgcgtcgctcatcacccgtcccgttgtacctttgccgtcgagcaaggtagcggaatctactgcgaagaagacaatcggtaacgaccatttcaaacttggcagattcggcgaagccacggaggcctatactgctgccctcggccccctcccttcaggtcatctcctcaccatacccttgctcaacaatcgtgcggcctcgcgcgtcaaacagggcgatcacgctggtgtcatcgccgataccacacaggtcatcaccatcattgggctcgacttccatccggtcaaggagactcccttgaccggggatctcgcagaggtcaagctcgccgaggggcttttcaaggccttgagcaaacgggctactgcgtacgagatggcggagcagtggagcaaagctcgggatgattgggagcgcctgatgggtcatgctgttgctagtaatcagggaccgaaccagcgcaagatggtttccgacggcttggcgcgatcaagaaagatggccagtccgagccagtccgcaaaacaggcagacgtgttcgatgctccgaagccgaaacctcgagttgcaccgcctcttcgacaagcaccaaaaagtaacgtcgccttccagtctaagagcgtggccaagatgcgagagcaagccgccgcccaggaatcggaagaaaatcaacgcgtggacctgaaaccagaagtcgatgcgaaagtacaggcctggtccggtggcaaggaaaccaatctgcgcgggctcctgtcgagcttggatatggtcttgtgggacggtctgggcgtgaagaagcctactatggccgagctcatcaccgaaaagcaggttaagattggctacatgcgcgtcatcgggcgacttcacccagataaggtgcgtttcgagcacacccaaagcatcggtctatgaaagcatggtacttacgttattcaatttgaaacaaaaacagctcaattcaagcaccgccaacttggagcaacgcatgatagccaattccgtgtttgggattctcaacgaggcgtaagtgaaccgatcgcaatgtaagcgacttcatatgctgacgatcgtatctatgcagatggcatgccttcaatgggctcagctagacgctcgtaccattgcatcagatgggccgatatcttatgtctcaggtcttttagaccggccaacgagttgtaattgaacatggcaaaataaagacaaaggatatcgacatacagggcggatgtccataagaaaggtctttgtaataccggtcacagtctggcagtctatggatgcatcatagtgttcatgtacggctgctttgtcatcgcagctatccctacaaagtcaagcctgtctgaaacagttacgtccttagagcaagaggtccaagttgtttgtttactttttgctacctcgaccttattcaccggaaagcgaccgaaagatcgtggacagatggttattacgagcactaagcctctatcaaatctacccctactccaactatacatatcgccaatcgtaagctagacaatagccccgagtcggtttttgaagagcatgtccaatccgtcgacgccgactaggcgttctggacgtcttgcaggaaccccgacagtatcgagcacaccgacaactcttgtagcaaaagacgaaggctcttacacctggggaccgcctgccgatgacattgaccagatccctgagtccagccaaaggttttacaaatcttatgtaaggagaggctttacgaaaccaacagccaagggcaagaagaagttgaccagcgagacgcaaggggaagaaacgttccagaagtttagtctcggagatggagtgctcgtggctgttctgggaaatgatgtcggagtcggtatccttaccaagatgtgggacgagccaagctccgacgcatgtcttgacaccgaagatgaccagcgaggtacaacggaagagccggcgacggacgagagaatcaaactctgtgaggtcaggtggttctacaggaaacaagatttgccaacaaccatgaatgtgctcaaggttgccgatgtaagcacgcttctagattgcagcctgatttctctggctaaggatcgtctgtttacagcgggaactgttgtacgcttttacaaactccaatcgacccgtcacatctacccttccgctagtcaatcttatcaacgtctgctcaatcatttcatcggatcgcttcaaagagctgtacccgaagtttcatccgagctggaatgccttgtggaagatcgagcttgctctcgattcttcgagtgacgagtcttcctcctctgacgaggacagggacgagctcgagctcaacggaccgagcgcaaagaagagcaaagccgccatggagcgagaactcaaactcgccgccaagacagcacccccgagtatgactctgcatacatccaccggaggattcaacctgtataagcgagccgtaccattggtatacttctgccagaacgctttcgacaagttcgccaagggcgggcaaggaaaaagttggtttagaatcgactgggataaacttgctgagcgaggaataaagcaaggggattgggagctacgagacgacgtgaaggaaatcgtagctgagacgaacgaggaagctcgacacctcgtcgaggtagagatcccgaccaagaccaagaagcctcgagcgacggccagaagagccaccgtgccgaagagcgaacgggacgacaaggcggagcgggcagagtcgtccagcgatgaaagcgacggatctcaactcaagggcatcgagtctcagtcttctgaagaagtttcggggtccgaggaggaccaagcaaatggaaaacgtcgaggcagaggaaagcgcgctgagcgcacaccaggaggcaagcgaaaacgcaagaatacggcagtaaccccgtcgaagcgtcgaaaaacagcgaagaatagtcggaagaaggtcaaggagacctatgatgcgatcaccgctcagctggatcctcatctgttacctaaagacccttacgagcgcgccctgcacctattacacgtcggagccacaccagacacgttgccctgtcgcgaaagcgagtttgtggacgttttaatgagggtcgaggagggcgtagaaggcggtggaggtggttgcctctgtgagttccatgtcacaatctgatgtttatgatgtcacgtctgagatattgcgtaacagacattgccggagttccgggcacgggaaagacggcaacggtacatgcggcgatcaagcagctcagggttcgagctgaagaaggggtcagttttcaatatagctctcatggtcatgttgctaacaggaggggcacgtatcaggacattctaccattctcctacgttgaaatcaacggactgaaagttccgacgcctcaacacgcctacacagttctctgggaggcaatttctggtcaaaagatatccaattccaagaccgcgttgcgagggctcgaggagcatttcagcgagaagggcagaatgtctggagtgggaggacccagaggccatactttgtaagctatctgcggtctaggaagacaaccgtttcgatcgctcattttcattttgcctcagcgttgtgctaatggacgaactcgaccaactcttgacagccaagcaggatgtggtttacaacttcttcaattggcctacgcttcgcgattcccaactgttcgtaatcgccattgcgaatcgtatggacctgccacagcacttggctgccaaggtcaaaagcagattgggtgagtgtcaaacgccatatgacgagaatgtcgctgaccttgaagttcactttcataggtctgcaaagcttgctgttccagccttacgacaaacctgcactcgtagagatcgttcagtctcgattgatagcccaccctgacagtgaacaggaccacaacgtgttgcaaaaggaggcgatcgagctagctgctgcgaaaatggctggtaccaacggagacgcccgacgagtgctcgatgcgtgtcggtaagtcccgtttcgctgcccgactgaggcttctctgctcgcgacttaccgtccgcgcggttatcttgcaggcgagctgtggaggtggccatggagagcgctaaaaccaatggggtcgagtgcaaacctgtcacgatccgtgacatgtctgcggtcttgaaagctatgaccagtagcccggtggctcttttcatcaagcactgtagcctccatcagaaaatgatgctcgctgccatgttaagatgcatccgacgcgaaggagtatcggagatcgcatggagatcggtaaggcccaggcagccaagccatgcttaaaccaatactgatcgaccgttgccgtttgcaggtccgatcagatcacgacaacctcttgcgagcgatcagtgactcgaacgacattttgtctcattcggaactctacctcgtgttcaactctctgatagcttctcacgctttgacgtgctcgaacgagagatacaagaatatggaagatcgtaaagtggcgctcggactggacggtaacgaagtcggccgagtcttgatggctgagggagaccgctggagccaggctcttgcagggatgtaatgcaggagggaaataacgatcgttgacgacctccgactggtatcatcgttttcgatgccagaatgaattcatgatgatacaatgttatcttacaacgctttgatctgacctaactagcctgtatcaaactcccgacgagtttctctgctgggtctggatcctgtctggccatttccgccatggtcaagagtttcttgacaccaatgttgagcttgccctcgcccccgaacccggcttgttccagcaagctcaaacaatgctgaagttccctctcgtctgagaagagttccacctccttcaggatggttgccactgaagaaagattgctgattgctggtaccctgatctctgcgtcgaaagcgtcgaccatttccatatccgtcagcatcgctcggtttgaggtagtggccagaatcagaagacgacggccctgtttgacgtatcatttagtcagtgcgtatccggcacctaatctcaacgtaatcaactcaccttgggaggacgcttgcctagaagcactaccagtgcctgcagtgccccgttcgagaaccggggtccgatcgggttccaatctgtaatgagattaccgggcgggcacttagttcgtgagttctcattccacatctggagtacacaccgaggatcctctcaatgctgtcaatgacaatgacactgattggactcttgtagctgtcagagaaaatcttgttcaattcgttgatcttgccggcttcgttgaatccgaccattgattcgggtgaaatcagcttgatgaatgggtagttcgagcctagtgccatggttgcagccagcgctgtctttccggatccagcgggtccatgcagcaagacgctaaccaatcttgttcgctctgaattcttgacctgttcaacgaatagttttccgtcacgcagaatagtctatagatgacgggcatcgaatcaatgagagtgttgcatgagcatcaaggagcaagacttgcctcgatgtctggcgagtagtgaatgatcccgttgtcgacaacggtcgagagttcctcttctgagacaccaaatgctgcgtgtacctcttccagggcactcaagaaatcggcacgagtaatttgcatgtcgctaacgtcgtccgagattcctgccatcgtgccaaccttgatatgacggttaaacgcaaaggtggtagcgctcctgacgagaccttgcaactcggcaccggagaaattcttggtcaagctggccagctccatgacgtcgacatccggagccatgaccttgttgtccttcatcttcgaggtatgaattttcaagatctgaatacggcctgcctcgtcaggaagcgaaatctcgatgtgaatttcaaagcgacccggtcggagcagagcgtcgtcgatcatgtcctttctgttcgtcataccaatgacgagcacgttgttgagctgatccactccgtccatctgatgatcacggcaaagcggcaaatcagggccagttcatgggtctcgtgccggtcttacataccttggacaacagctggttgacaacagagtcgccgacaccggttccagagctttgcgatcctcgctgtttacagatagcatcgatttcgtcgaagatgatgatatgcaagcttgattcgtcgcccttttctttttgctatccgcatgagatcgatcagatcagtagcgtacgaccgtaacttaacggctaatattccatacctccttctccgcatcggcgaagagctttcggatgttctcttcactggctccaacaaatttgttcaggatttcaggaccgttgacgatcttgggctcggtaacgttcaacatctttccgatctgacgcgccatcagagtctttccggtaccaggaggtccgtaaaggaggatacctgcgacaggccatttagtcagtcaaaacataatacaggaagcattgcaaacgtaggcatacatacctttcgaatgggtgataccaagcttttcgactaatcctggagggaagactcgactagcgaaagctcttcgaaagattgcctggaactcggtgtccagaccaccaatacccatgtcctcgaacttgaagttaggagcaatgatcgcttgtgtaggtgccctgcgccgacaagcgatcagactctgggcgcgatactctatgtgcaagcacctgctcacctgttgctggtgttcttgagcttgatagcactactagggtctttgaaccagttgatctcggttccctccatgatgattcccatgttatctccctcggaaccgtccaaggtcgagatcgagcggaccatggctttcatgatgatacctcggtagtcaaacatgatggtttgaagaggggtgagaggcagattagagaatgcctgtgtatccagcaacaagcaagcgtgagcgatgcaaccttttcactgtcatgactacagttcactcactgtgatgaacacctgagccaactgctcggtatcatacacctcgtgactctcagtcttcttgatatggaatccgatctggcaacctcacagatctgagcaaatactctcttcacgcctgcaccgacaaactcacatcaagatcaacatttccagcccaatcgccattcttgggctcatacacctcgatctcgacctgttctccttgcatactcagaccgacccattgtcgaatatgctttgaaggtccgatttccctaggctggagggagccggtgttgtcgcggctgaatggcacggttgccgcaatgagctctcacgtcaccctcggagctggccgagcagactcacactaatccaaggacgtagcgacctttgagacggacgtattcgatgtcttccgggaaatcttgaggatggacgaccaaacggttcgtcagagctagggcggtggtcgggcaagcagcaatgttgtagctgtcaccagaggttgacggtcgtcaggtcagatggtcgaaatctacgcggtctcgactcacatgccacctccttggccgcgctgaggctgttgctgctgctgagcaggttgggcaggtcgatattccgccttttcacgaggatatccattgtccgagtaagccggctgagcgcctcctcgattgtaaggctcgtcctggtacccacgagcgggcaagggcggttgctgagtgtaggcttggggttgagcgtacccctggggctgcggctgagagtgtgcttgaggttgaccgtacgctcctccgcttctcgagtcgggtctaccatatagatcaccaccagcaggcgagggcactcgacgctgctgagaattgtcctgtacgggcaaacgatcgtacggctggcttggaggcggttgctgccgagctggactggcagttccgctcgctcgcggtgcgggaccgtcgccggtcctggtaaagaaaggcatagctagttgacactcagggatgtcttgcgatgcaattttaccttccgaggttgataagggatgtcgacgtctcgatgcaagcagatcagttgatcagagactaaaggtgaccaagtatggaacgtggaggcagtcgaggtcgctcgaacgcgtcaacctgacgtttagatttccccgcaaagtgatatcatcacggactcactagataaacctctacgaaatatccagcctgggcaattacacgatctgatcactcgaccgggctgcttcacaattgcatgggtgagacgacaggtataaagtacatatcgttacaaagccccgccatggatgtctatcgtctaatcctgttgcagagacttgttcgtgtcgaccatgatctcggtcgctatccgcttgccttccagcaagagtcccggtagtctacccaggtcgataggttctcctccctctattcgcagaccgcacaccttcaagtctcccagactcgaggtcgacgtccgagagctgaaaacgatatgcagccgggatgggcaggcgatctcttcctggcgtgatgcgtcaaggaagtacttgtccgtgttggggatctgcgttgcgattcaggcagattttagctcggtcacgccaagagtaacgatcaggataccctgcttaccaagtttagcgtgacgcaaatcggcagacccagccggatcggccgatccatcaactcgccctcgccctcgtcaccaccccccagatcctctagatcccaatcgtctccaggtcccgctacgtactcggcccggcccttgccagtaatcttcatttgcctctcttttcccttgcctccccgccttgcctttttctgcgccgccgtgttcccacgaggagctctcacggctcccgtcaaccccgcatctccaccgacgaacccagcacccatatcatcgtccgccccggtccctgtcgagttgtccgggatggtatctccacttgcagcgccttcgtagccgacgtatttcgtgacgggtacgtggaggtttgagaatgctgctcggagcgcgacgaagaggacgaagggtacggaagcgctagtgctcgacaggatcgaaacgtggatctggggttgaaagtatctacgagacgaaccgttatcaggggatgacgagagggaggaaagttacagctatcagtactgacttgtagggaggaagaatcgccagaggtggtaggtatggcacaaagtgatccgcgatcaggtgcgaaaagtatgacgagagcgcgttaaggccttgtgactgaagatgggggtatgcctgtggcgtcctgtgaatcgtaacatacggaaagagtcaagactcggcccaaaacaggatcgggcaaggacttacacatccacctcgacgcttgctctccagctttccttgcccttacgctcctcgtctgcttcttctccaatctcggcagcatccaccacctcgagcttgatcccaaccatcacttcagttccaccctttccaccgagaaccactctcgagcttccattcgcctgaggtgcatctccttgtgaaatctgtaccgatcgaaagtcttcgagctttcggttgtcaagtcgggtaggtgttttcggatcggccaggccggtctggatgtatgaccgctcggccggcgaaagaaggggtaagagagacatgtcaatgtggaactaaggcaaagttgacaggccaagtctattaccggctgtccccggggtcagaccttgaaggctagatattcaacccgaatatcagacttgtaacgatgcctgcctgctcagctatgatgcgatcgcgaaattacgagtttagagccgagacttgcaggaaaccgttgacttcgtcaccggtcttcagcttataagccactggcaaagtcagtgcgtctttgcaatgaattatcgcctcaacttcgaaatcattctctttaaagtcccttggaaagcctctcagggaattcagggaactcgtaccgaccagctccttatcatcgagcacgctaatcaagggatatacttgaaacgtcagagaaaaagttacctcgcaagcaatcgtaagacagtgccggggtcagtacaggtcccgttctgttaccgcaaggtatcggattgcgtcgaccgtagttgttttcatgagtaaaagatcatggttgacacgtttgtaagatgattcaaaggatgtcgtacagattgcagagattgttggcttcaggtttcgagcgagatgttcacgtcgttcacattgtggtgcagcttgcttgtggttccgaggaggccatatcgaatttcactacgaagtggatagtcatgccaggctgtcaatttcacgaaggggtgacgattataaattcgcactggagcaaacagaattgcaatcaccctgagccgttactgacctggacaaaagccattgcctcatcgatgaacaaccccgacatgctctgcgctctgtaagactcatgcatagcatttctacataggaaactgcgggaagatcgctcaaggagacgatcacaaggttcgtaaaggcgatataaaaaaagaaactatgtgggtggccaagacgcagcgtccgcttgagtatccgaccgagcatgtcgttgtcgatcttgttgtcgttttgccgcaggtcggacctgtggtgccatattagcagagattctttcaagtcaaatcatctctgcaagaaactatcgtcccgatgaacatcgacttctcggcaacgcacacaactagtttcagcttaacactcacaacggttgactgattacaccatcttcaaatcacatctcaggcttgaataatttgatgatggcctgaatgccccgttgcgaatctgagcctatgtattgaccgtcttatcgtaagacgatgtcactcacattgttcaaatgagggttcttcccgtaaccgacagagcgattaaggggtttctcgttagcatttccagcttgctccgcttgtctagacagagcgccatcggtgcgtcagctaaaggaacttgggagggagaaaattgatatgacccactcgagattcaggatagtacgctgatactcgttgtagagttgctccatcgccttactcttgtcggccatgcgctgcctctcgagggtcatctgtttctcaacttctcgtttgaacgttttgagctcttccatcttgactttgtattccttctcgcatcgcttagtagcactcgtaagagactcctcgtgatgaatgagtagctgttccctaatggtttcatgctcaaaggtcatttcgatgaaggcactgtcgatcacgcgcctaagagcgagattctcctcgcgcaactgggcggccatagccggttgtcccatagttttcttggctgggttgacggacgaggaccttgcgacactaggcgcttcctctattgcaatgtagatcctctgataagggcgacatacgtgctctccatctgggaccaaccggcaaagagggctaacgctgcgacactgcgggcatttcgggcatccagtagcggaaccacggacgaaagggtcgagattcccggtagcgatatcgatgcaagcgatatgaaagacgtggcctaaaattgggaaaccattgatactcagttgatgtctttatttcccattcccgcgcgatacacataccgcagcctcgccaagcgccttgcttataagctttcccttcagaatcatcgcccaacagggcttcgagacagatgctacagacggccttcatgcccactgcgacttgactttggctcatatcggtgatcgttcctatgcgactaggtgtatcagcggcacatcccaagtcgtttggatagcttgcttcttgagactgaccgtaagctccagacgcttctgttgggtaacgtggaagtatcagagtgtactcggatggcagtaggatgacggttggactagaactctaccagcggatgtcaacaatacaggagcgcatatcatgcaaacgatgaggattggccaacgactcgatagagagtcagcccagatcatgatttgttcggtctagcccggatcagatatggtatatgcgcggatacaaggcaaatctcaatgcccgaaggcaatgtttacgcaaacccgaatttctttattcttcaagcgcggaatatttatgtaaatgtcaaactcctatgctcatgtacgctggtaaaacattcaagagattgtcgggtatcctacgataccaccagcgatacaaacatacaaaagatttgccacgtcgcatcagagtcaaggaatcagccggagaacccggtgaggtcatctcggacttcatccttctgggagatcatcgataacttgaagcgtttgctcctaatgaggttgtagataactatgaggagacaagattagagtaacttcacaaattgcgactacctcctctccaggccaaaacaactcactcgacttgataagatgcttacggtaaagcatgtgatcgagtgggcggtccactagaccaggctagtgggggaaatgtcgaaacgtcagtatcagcactgattaaaagctattataccagggcgttgacagtgactcacggacggaactgcattcccacagtcatgcatgcgcttgttcggcaagtgagctcgatgtttaagctctcgcctaagccgaaaattctcgtccagggcattgtgtaattttctttcaagcgaacagacaacggctttcatctcttgacgatcacgtccaagttgattctggtactgcgcttgcaaagagaactccttgtcgaggcaaaggagttgcagcctctcggactttaatagttcggtgtccgaaacctcagttttaagcccgcaaagtttcgcgtctaatttggttacgttcccgagaagctcaaattgggtggattgtagagcgctgatctcctgcgaggcctgtgcgatatgttccaagatcctgcttttgcgcttcgaatcttcgcacatctttatcagctcggtcgtgctgtcttccaggtgttggacggatgcctaggtcaatagatgttcgttaggtaatgtatgatattttgaaatggacaagaaaggcgtctcacgactagcatatcttgcgcctgaacgcgtttcactctagtgagtagcctctctaaatcttgaatggccgtaaagaaggacgaggaagatgtttgaagggctttgacggttccagaacactccggttcgaatgccccgagatgtttctcgagtgcagccttaatggtatccacgtccgtcttggccaatccagcgagcgctatgatatttagattcgtttgagtttgatcgtcgaatcttatagtgagaggtaggacatccgtatcgatacggtcttgcgtcgatagccagattcgagagtaagggctgacatcgcctcgttttctgagaagggcctgtcctttgctacaaaccgcacatttaccgaccttgtatcgcagcccgtctgctgtggttgccgagatccgcagagtggcttcgatacaagattgatggaacgagtgacctgttaaggccagccactaggaacatgagcaagtcacacatccctctgggcttgtcgaccgacctaccgcatgcgttccacgcaactgcgatatactctgatcctgcgtccgaatcgaatccgcagaggttctcccagcatataggacagacgggagaatgagggatatcggcttgcttttgaagacgttgtcgtacggcatccgagttgggatcctcctgcactactttcggtcgggagccccaattggcaaacagggacatggttcgcgggaatatgtgatcagggttgacctattcttgagcgaaatgtagtgtcagccggcgagcctttaatttggttgatctgaaagcggattcggtagctcctaggttgtcgatctgatttcgttcaggcaactttcgaaaatgattgcctcaaaagaccgcttgctactgagtagcacttatgagctcgacgcctgaactacaagaatcgtcgaaagggataagggagtatagtacgttggctgtaccgatcggtggctaggtcggtgtgatatcatcgcaccattccccccatccaatagtctgctacgccagcttgatttgattgatcttgcttgatcgcccaagatcagggatcaggaacctttgcaggcgcggaattgaccggaatgcgtaggaagctattttacatccgaagccaccaaattgaaaacgaaatgtgctgtctcgatggacgctactatatatatcgtcgctatctactggctgatggtacccattgctcacgtctctgatttactcgcccagttctaaatccaggtgatcgctccagctgccatcagatgggatgaatggcttgtacttgtttctgcgcttgacctggcgttcctgcgcagtgggcgaagccttcctcttcttggcggtctcctgcatcaccggagcgctctgctgcgtagaacgagtcccgacattccgcggagcgtcctcaagaggtcttccaatactgagatgtgtcaacagtcttttctcgtcggttccgctcccgctttcctgctgaattccgtcaacatcctctgctgcatttcgatgggtcatgctgtggcgggtatcgtctaagtgtcgagacgcggcctgaggcgacgaagattttctgttggaggtgaacatattgcttggaatcccaatccgttccacgaaaaacgtattcccggcactttctcgcaaactcctgtacacgcgaccggtactgtaagtttcctatatctgggtgagtcggaggtagtgcttaccttctcgatctttcttcgtcgctagaactctcaggttcggacctcacgatcccgtcactttatggagtcgaattggtccttgttcagtgctaccacgagttgtgtcgggtccggtgcgcagcagactcacctcatcaggtttctcctcaggcgtctcctctctgcctttcttttggctctggctttctccacgatgatacggtagtctctttccgcatttgaaatcctgacatcttcagccctctcccactgccatcttgccgtttcgagtcgtaaacccgcgatcgtcctgtctttggacaacaaagcatactcgagatctagtatctttcgatttttgtctataaactcttgtttgtttgcttctaggatagcccgttgtcttttgctgccagtcttcacattctcaatcatgctgtggagctggttgttgacagagagtaggtccaagtggtcattgttggcgactctgagctctctcttgaccatctcgagttctgtcgccaggtccggcttccccaaggacttcttgcgaagttttccaatctcgttctagcaggagtcgacaatcagcttgtttctggtatttgcgaggacaacgtgacacgtctgctaattgtttcacttactgctagcgtaccctccgctttgatctttgtcagagcttcgacaagagccttcatttgcctttctccaattcggattcccatatctatagctcccctgtccctttcattcctctcgcccctaatcagcgcttggagctcttccatctccaaaccaagcttcgaagctacgagtgcgagatcgaagtgggccctggcttccccgccgacggtgatagttacaggtgtgattttttgttcggcgtcaggatcggtcgacaagaagacggtcatgatcgggtcgcagtgcttgttcaagctagaatcaaccagacatgcattgtcttgcatgttgcacgtcgggcatctcgggcaaagccgcttctgtacgtcctcatcctcctcgtcaacgtcgtccatgtccccccagcggtcgtgctcttcatcgtcgtcttcgtcatcccgctcaggatctaggtatcttgaatccgggcgaggaacgtgtctggtcatgcggggaaaagttccaaagaccgcctccaagcaacttcggtgacagagatgtctagaaagtagcgaagtatggtttcagccgagaatccttgcgcatcgttgccggctttggctcacccgcatttcttccagaccaccacttccttaggctgaaggtagtcggaatccgtaacgatgagagggtcccaacaaataggacagatgggcgcatgggctattttgctttgcaggagcaaggacgacctgcaacatcctggtcggtcgactccggccatggccgacagctgactcatggtcgcctgcaagatctaggtaggatctgagttcctagtagttcaatgcattgattttagtccggaatcgagatcgatttggaacgaaacaagggagctcgatctggtacgtaccttctcacaactcttggtctcctgccgtacaaccggggatcacgaccggagccggccggaattccaagagcactggacgacgtgtgggaacacagatattttaagcagcggatgacgataggagtggtgttatccctattcgatgtttaaatgagtacagcagtgctataacaaggatcgtctatcgagctatcgaagttgcctcgaaaggaagtggatccccaagaaccaaagagagcagatagcaactgaatcatcagctagaatttgcttccggtcagttgagtgtcgaagtgaactgatgaccgaggttcggaggcaaacctggcactggcgggctgcgtaactagcgccttgaacccccatatggtcaggcgcacccattgaaaggtctccctttcggcaacaacttcgaggacgattttgaagccacagataagaagagggatttctcagtataggagacaatctcttgaatagagcatccaagaataccggcgtcgggctcagcttcgacaccactacagccggtggcaatcgggaccaggaccataatccatctggatgtagaatattacagccatgattcaagttctgtcacggcttgatcgttttctgtaggagtgtgtcggttactgatgaattagatttgccctactgctgattgacttatcgataggagttgggagtggagcttgtatcttctccactgcgagtagagattaagtcaggccttcaaccacgaattagctcaatatgccgccaacttggaagtttgctgcaaagtggtacatcttggaagtgatcatcgaagatgagagtcgcagagcgcagttgagcagcaggaccattttaatatggtggccgaggtgacaggataggtcggaatcaaatttacgtccgaactcggcgacgcgcaactaacgttagtcccctcagagaagtcaggaccggacttgagcaacttcttgcttgctcttgatagcatgttttcgggccatcgacgttcgctgtaccctaccaaaccgctcaagtcgctcgttctgcctagcatacgtgtccaagaactatcaaatacttcacggctaccaaaatgtctgctcaagcaagctcctcgaaagccggtctcagttacaccgatcgtatccctttccactcgaatgcggccgccaaacagcttctcgctttgatggacaagaagcagaccaacctctgtgtcagtgttgatgtgaccaaatcggccgacttgcttgaagtcgtcaggagagtaggaaagagctgctgtatggtcaaggtgagccgcagatccaactcgtaccgtttcgagcaatgctgacccgaaattccctctggctgatgcagacccacattgacgtcgtcgaggactattcgcactcgctggtagatgagctcgtcaagttgagcgaggagctggatttcatgatcttcgaggaccgaaagtttgccgatatcggtaagccgggtcggtccgaggcgtctatgcatccatcctgatccaatacatccttgtaacaatcaggcaataccgtgtccctacaatactcttccggagtacacaagattgcgaactggtctcacattaccaacgctcatcctatccccggtgacggtatcattaccggtctttcctctgtcggcaagcctctggaccgaggacttctcctcctcgctgaaatgtctagcaagggcaaccttgctacaggggagtacactcgacaagctgtggagatggctcgaagacaccgtgacgacggtttcgtcttcggtttcattgccatgaagcgtgtccacgaggaacactcggctggcgcggccgaggatgaggactttatgatccttacgcctggagttggactggatgtcaagggagacaagatgggacagcagtacaggactcccaaggaggtcattcttgaaagcgggtgcgatgttatcatcgtcggcagggggatctatgggaaggcgaacgagcaggaagtcaaggacgaggcagagcgttaccgaagcgaaggatggaaggcatacctcgagcgaactcgcaagtaaagctctgtatttcaagcgtgtgaagttaacgaatcgacacaatatacgtatgggagactctactatcatacaacgtttcggagcaattaaccggtttatatggacacaaagtcaacggattctcatcgcttgcatacggcacaatccaatcagggtctggtcgtatagtcgttatcgctggggcatcatgccgaagacgcatctcgttgaacgtatttcgttgtttggtgtagctttattgctcagcgtctgcctttctctttttggcaccagcgcgggtctctctgggaggcgtgtcgtcccttgtgatagtgctgctggcttgcgaagatgacatccagcccaacaacttctctatcgcgtcatctttcagactggagtctctctgtatcttttcagcctgccggctagatcgaaggatgatcttactgaaatcggccgattcttgactgctgagagggacgactttgcgagactgcctcgcggccgaagagctttgaggcgattgtggcgggtcagacagatctgtctcagtggtcgatctcggagagctgtggtgatcgatcttgacccttttcctagaaggtgtactcggtgcgctcgaagacaggtcaatgatgtctttgggtcggcgctcaggggtgactttcggctgtaacttcttcacccggaagtctctccggtcaactcgcgaaagccgaaattcttgtacccatcgaagtacttacggctttctctagatccttcgcccgttgctcggcgacttttaacttctccttgagctcgactaatttggacttttgattggcaacagtagactccgctttgctcaactgtttataagcagggaaggtcggttagagaaaaccattgcacaaaactctacccgacttaccttggtcctgacattttgcatctcgttagcagacttgaatttctccttttctagcgagccaacgagtctaaagcggaccggtcccgcgaaatgagatgacaatctgtatatcttccgtttacgcagacctaccccttgttcttctttccggacgccttcaactccttgatctgtttgtctctttccctcagatcagccttcgtcttttcgtgagctgctttcctatccaggatccttcggtccagggcttggcgatcccgttccatattggctatcgccgcctcgtgccccatctcggcgtcatggacccgttgatcggcaaagtctagtttgacctgttcggccgcttcgagctgcgcgcgcagtatctcgcattcttccgcctggttcaggatgtcgtgcagctggagagaggcttcctctaacccttgtatgcatgtctggaaagcagaattgaggcctttgtcatatatcatgtcctgtgtttgacactcaccttgataatctcgttcgcttgcttctccttcattgtcttcatgaccttctctaccttcgttttcactgcagtaatctcggcctttgatttcttccccagtcgatacgatctattccccactgcgttgatgtccaagccgatcataccattgacattgacattgggcatggcctcgacgctctcacgtactgcctctgcgacagcctctaagtctagaccgagatttcgggcggctctggcataatcgagctttttggtagtgccatctgggagttgaatctcgatgaagacgatatcttcggcgtccgtggccggcttgaagaggtccccgccgtagtcttcaataaagatcctggtcgcggggaagcagtagtacgctgcggccccgtaatacccgtactcggccatgcatttgctgctcttgcaagcggttgggatggcacgacatttggggcacttgggatgatccttgtatagtgtagtggaaaatgcgcggagttggacaggaaatcgagacagttcctctcctttcagcttcgagaatgtagctaagaggcagtcttcgtgaaagagatggcctagcaaccgcaatagcggcggtctaagatgatgctgggctgatgcacaatatgaatcaagttctactcaccacaaccattcattgccgccacctcgaaacgtttgttgaattcatccttggcgatcagtccttccaggcagatacagcactcgtgctccatggctgcggggggttcaccaccgctcgcagacggaagaggtaggatgatggcgtcagtggggagaccgaaccactctgagcggctgatattgagaagggagagaggtagtatccagcgagaaatgatgactagagtcgatatgtagtcggccgggaagtcgcacgtgagtgcggaagaggtcgaggttgatcactagccggtgaaagaacgattaagacgggatatatcgctgttgtccgaggtcgattccttgatgtgtctatacgaatacgccatataatgggctccccaaggaaactacgaggatgtggtcttcaggtgcttgtacaaaatggtacacggatgtcatggcataagaatcatggtcaaaaccgcaatccaggctgagctcatcctcgggcttctccttgatcggaagcaaatcatgaaacgcacaaaaggaaattgaaaacaaagtcgagctcggtaacgatcgtcgtcgaactgctccacgtaatgagtagaatgaagagcaaggctgctgtcatgtaacatcccttgatgcgatcgctctcttcttggcattttacaacggctacattgatctttacctataatatttggcgggaacgaaaggcatcccgacgacggtagcgtccctcaaattctttctgaccttgaccttgacttcggtccccttcttgtggtacccgttcttgatatatcccatggcgatgtttttgcccagagtaggagacgggatacccgaggtgatgacgcctacatgacgttcgactacgtgagccggttgtccttctcatttggcaagtatacgcgcactcacccagaagcgacgcttcatccacagtgagaatctcgcagccttcacgagctggagatccggtaatctcgaacccgactcttcgacgagcggggccctcctttagctctcggagaattctagacgctccagggaaatccgcagcggctcttcgatccttgcctgttgatcacccaagcaccagatttccggatgagccctgacttcatacctggccctgacatgaaagctggacttaccgacaagccaagcgagaccggcctcgatcggactgaccgtctcgtcgagatcatgaccgtacaagcacatcccggcttccagcctgagcgaatcacgagctccgagtccaataagggagactccaggcgaggcagtcaacttggaggtgatttctacagccgacgctggcggaatcgaaatctttttaccaaatacgggtctgaatcagttctgatcgagactgtctgtagtcaggccatacatacctcgaaaccgtcttccccagtgtagcctcctcgagcgatgtggcattcgacaccgttgactttggcgtacgttgcttgtccaaacttgaccgttgtcaggtccttgtcggtcatgccttgcaaagtctcggcagccttgggacctgatcacgaacaaagcgattggactcttaagcttgggcaaatcgtgatagacgtccgaccggtgtgaggctgaccttgtagagcgatcaacccgtatccctcgagcctctcccatttgacctctttgcctttacccttgccctctgtaccgttccactcgttcatctttttggtgatccaagcgacatcttcctccgcccttccagcgttggtaaccacgtagaacctctgtccgccttgtccgtcatcaccgtgcttggtgacgatcatatcatcgatgatccctccgtcctcgttcaaaagcaccgacagggtcgaggaccaggttgtgagcgagccgagtgacgaaggacagagggaggagaggaattcgagcgaggatttgccggtaaagacgtgttgtagcatgtgagacacgtcgaatagaccggtttcggttcgtacatggccatgagcagtagctgcaacgtggttgaagcttgtcagcggtcgtaaagacggcgcgagaagacttgtcgggctcactctgtccgacggttccgtagctcaagggcatctcccagcctgcaaagggtaccatcttggcaccgttttgtttgtggaaatcgtgcaggggagtccttttcagctcggcctggggtgaaatatgtcaggtacgggggttcagtcctgcacgatcgcgtttgctgatgtaggaaaagtagctcacgacgttgccgttcgggatggcggcgtaggacctgcattgagagaatgccacgactcgggaggcaatctgggaagtgctaggccgcactgatccagccaagtttcgtccgagaagattcctgatcatcatagtgctgaagagtaccgtctcgaagctatgacgtgtagcgggtcggggttcgttgtgatcgatggctggtctggcgtgatggatcttcccagtgagctcaagctttcggactggagtagaaagcctttatatacgatcctatgggcaagaaacgctcggaaagccgacgacttgctctttttccaagtgtcgagttgtgcaggtcgagcccaaaggcaggaaggtcaagccgtacgggtctgttagagggaagcgatttccaacagactggtgctcggaagcaaatatacgaccgaagagataacgatgagcatcgggcttggcttcttggaaaataaaccggggcggaaccgtgaaccgatgcggggcatcgacgtgcgagcggcatgcgatcggcacgacagatctcgttgtgacagtcatatttacatggcctctccatcaagatcctcatccgcatccatcgcttctccatcaagatcctcctccatggcctcaccatccagatcctggtccatggcttctccatccagatcttcgtcatcatcgggcgccgcgctcgataccggagctacggtcgacgtgacaaaggtcgacttgaaaccacccgccgacgcctttttgaagcgactagtgttgagcgattggtttttccgactcgcttcttcttgactagtcttgttcgagtcttgacgcgactgcgccggagcaggttgcgcggccgcgccgttcagcacggaacgcagcttgtccgtcacatccgaggtgaagacgatcctataacaggcgtttcgcaacgtcagtatgatcgtgctggtgatccccctggcatcctgagtgcctaccaattttcccaaatctcgatgacaaaggccacctgactcttgaaagtctccccactcagcttgccagaatgagcgaccagacttcgatgcacatctgccatgtgttccatgacgtcgggtagtttgccctcgaaagcgttacggtaacgccagacgtttggtaacgaggcggcctgcataaacggctcgtcagcgaacatccgaagcagacgcgtgcagatccggacttaccgagttgtgcaggatatccgagatgagatacagcctagcgagtttcctgggcacggccgtgccctcgatcttcaagctttgacagatgatttccgcaacttcgtccaccgcgtccgcatggatgacggcaaactccatcaatcgggcgatctgctccctctcgcccgtcatcgctctaagaccggcttcgaggcgtctcctggccatcttgccgagacgacccttgttggtccggtgcattcgttctcgctcagagtcctctgccgagtcgctcgagtagagttctgccttgccctgagcaacgcgtcgagaccaagatgtattagtgactgcgaaccgttgggtactcggcacgaccgaacgactgacctcgtctgcaaagtcatctggaggtggggtgggcaggcggtaccgcgaatccagacaatatcggtacaagtggtactcgggtagctgctcgttttcgatgacgagtcagtcccttgttgcagcagtctgacaccgggcctgcactcacgtcgacgtttctcaaaaacgcaaacttgacgttgtccctctccctttccctcaagacctgttcgaatttgggcccatgctgtttgacccgactcgcggcggctcggacaaacttttccttatcctcgcccatcttgcgagtaaacttggcgagtacggcttccgctctatgatcccgcggaggtcggcgcggcgaacgagagcgtgacgaggcggacgagccgctcgacaaggaccgacctcgaggtggaggagggggtccgtttcgtggtcgacgacggtcttcgggcgagggtgaacgacctcgatctcgggatcgtctcctcggtggtgttcgactgtgacttgggctcgagctcgctgcacgaccacggccaccgtgatcacgatctcgaccgtgtgggggcggcgagcgacgtcttcttaggggcgaccttgacgaccgtcgacggtctccttctttgtgcgaggtaatgtctgttcgatgggggcggtgatgggggcggtccacgtgatcagctcctctgtggtgcatgacgcgcacccgaacacgatcttgggtactcgccatacaagggataagccgggattttgaccatcttgctccacccgaccctcaacaagctcccaccccaatccaacccatcgagctccctgacggcgacctcggcgtccctcctgttcatgtacgcgacgaacccgctcaaccccgccttggaccgccgggtggaagtgatccctgcgccgatcgacgtgtcctcgtcccccctgggccacatgattttgaccgccccgacgggtccatactttgcaaagaaattccccaacgagtcttccccgatcccttggggcaggttgcttatgtacaagttggtcgtctcggtattactcgccagggttcgcatccccgcttgtttgttacccagtgcggccatggcagagacgctggatccttccgcctgggcgacccgaccgtacttttcctcgcggtacttttcttcccgcttgatctcttcgagaaaggcgtccatcgcgcgtttaccctttggtttcgacgatgtcgagggcggggatggtgaacgggctcgatgtgcagagtgaaaggccgacgaggaggccgatgggcctgtagggattgtacgggaaggtacgtacgcctgaccaggagcatcagagcctgtacatgcgaacgcgaaacggagtgatcagctcccccaccccccttcccggctcgacttgaacctagctcgggacgacgatgactgacctccaccggccttgacgaatcctccagcgaccccggttctggtgctcccgctaccacccggacctgcgcggatcccaccgcgaggagcggaagccgcatcgtccccagcgaaaaagtcttcaaactctttatacgccttggccgcgtcgctgcagataagagaagagggcagggacgatcaagttaggttaggacagatcagtatgggaagtgaagggacacgtctcggtgatctgacgatttcgaattggtgggggggatggtcgaactcacacttcctcttgtttccgtttccgctcttcttcttccctttccaattcctttttcgtctttttctgaatcccgtgcgagaacgtctgttgtttgaaggaatctaggacgatttgtttctgcgtcgcatgggatacgaaagaaagtaaagtcgatcagtttgtctagcaagtaggtcgagtaggaagacgaggagcggttgggggagagggacctaccttgacgggaggcagggcgtcatcttccgagtctgaatctcccctgaatttcgaaaggtctataccgcgaggcattgctgtgagatgtggttcgatttgttacgatcgatacgatgtcgagttgcaatttggttcgtgctctgtcgtcaaaccgtttgatagccgtctaccgtcgagtaaaggtgcagtgagtgatggtgactatgagagtgaggatgacatttatgactatcatgaagtgaacctgacatcattattcccgagcgaggacaggagagggggccatgctaaatgacgcgcgcgcgtgtttgacgcgttcgcgcgatcgttccaaaagtcgcgtcactaccaagctaccacccaatccaactcgatatcagcagggttagatcaaatcatcatccatccatctattcacccaacgtcacaccatacaactcatacctacatacatcgcacacaagatgaaaagacgaagaccggaatcactgcctactttgcagacgggcaagatccataaacttccaggtgagacgcacccacgctcgatcggtcatcacccagggtcatcgttggctgacgtttcccaccttctcctttccccctttgtttctctcgctcgtcgctatccgccagtccgagtctattacaatctcccaggctcgcaatactcgtacacgaccaccttgcccacccctcaagacgtgttcatccatcgacatccccgaatcaaggtcggcacgagtacccacctgaacgggcgatcgggtggagggcgggacgatccggcagtcaagagacgtagggtcgacggcgaggtggatgcggacttgcaacaagggagggaaacggtatccggacatgctacggatgagacgacctctgtcgagcgggagttcgagggggatcgggagcaggaagaccaagatgaagaggacggcgaggtgtacatgggcagcgtcagcttgcgagccatcgtccgagccatctgtcgtgcgaggtgagttgctcccccgccaccgcgcgttctcgacccatatcgtcgtcgtcgtgtttatcgtctgtgcactgacgatcgactacctcctcaccgacaatctgacaacgatacgttgctcacggacccagccccgagatcatcccctcgatatctaccccggattgttcgctgtacctccccgtcctcacccatccgagtcaacctatcccggcgagaagacccatgtcccgtttcccgagcttggagatgcagatgaccccggagaacacgaaccacgtccaagggtcttccccacccgggacaagcggttccatccagacccctagggatcatcgtgctcaacatcaacatcaactttatcgacggccgagcgtagtagcccagggtggtggacatccgcatctccatccccagggcaacgtcccctccccggcttattcgaacacgagcgtatccctcgtccccgtcctcccgccgccgcaggaaggcaagggtctcttgtcctggatctacaacgagtcggccccgggaaagacgctggggaaggggtacgtccggctgaatcctctcccgctcggacgggatggactgggaggggatgacgatgacgaggacgatgatgatgacgaggacgatggtgacgagcggatggacggagataccgagcgtggggacgaggatgaagaggacgcggtggatgggctcgagggactcgtccgcgcggcagaaaggcgagcaaagaggcaagccgagaggagggagagggccatggctagttcacgcgcagggtcgggacacctaccgcctacgtcgaggacgcggacccgtacgtttgggctagagctgaacgtcctgctcaagagcgtcccttctgcagcgtcttccactggcgctactagcaacacggggatcaacccggtagaggacgaactggacgtcaaaccaatcatcttgacggggatgaagacttccatggatttgctcggcgccagagctgcgagtcaaggtcagaccgtcacccagagcaaccttcgagctccagcagcgtcgcaagggtccaacaagaatcgaccgagcttgggtaacgagagggcggcttccagcccggggttattggccgcaatggccgggacgaagttgtcggctgggacgaggtctagacggataagcgcattgccaacttcgaaatccatggtagcgtcagggacgcggacagagccagggtcgtcggctctcaatggcgcgaccaagggcaagacgacgacaacgatgacgactccgacgaccacgatcgacctgacgggtcacaagcccaaggtcgtccaaagcgggtcggcggcgggagatgattacactccaccgcgtccgcctgtcgttccggggacgtcgtccggtggaaccctcattgccgatatcctcaggacgcccaggcaagggtccaaaaagaccggggctcacaacgtcgattccatgcaaaccgatcgaccgccccaatcttccccagccacgcacatggcgctcgcccgacaggtactcaggaacccgacgagccatacgctcgatctcgctcaaaagttggtcggcaaagacaagtttgctcagatcttgatcgaaatgggcgtccaagtgggaagtccggcagaacctgttgcaggatcgtctcgacagggacagacaggtgaacgtggggtagccaccacgacggctgcggggacggccatcacccgggcgagggccaaaggcaccccggcagctcccgccacagccaagggcaagggtaaagctagcgtcgttgccaccggactctctgtctcgaccgacctcccgggcaaatcagttccacccgtcccagcggtcaaaccagtgtgcaagaattgcgggacgaccgagaccccgcggtggagggtcaagacgctggctgatggcaaggaaaggcgggtctgcgacgcctgcgggatttactttaacaagacgaaacagatgcgacccaaagagctgtggtccccgaatgccaagaggatcccgctagaagatatacccaagcaggaagccgccatggctgcgtcgcgggcggcagcagcgaaacagatggccgcgctcggcaaggcttccaccacgacgacgacggcgccgacggcgacgagcatcaacaacccagtcctgccgccgaaacgatcggtcaatactcaatcagctccacttgcgcgtcaacctggagttgcagaacagactcaacggatcaacgaagtctcgtttgccgaactcccggcttccccacctagacaggctcgaaccttgtcagagtccgtctttacgactccaaggcggtcgaccaggctcagtcaaggcggatcgtcaaagaacccccgagcagagcatgacgaggccggagcaagtcctaaattacgacgcacaccgaggaggatggctgcgaccgctgccgcgagcaaggtcaaggcgacatttgagaatcacgccggcgcaggcgctcggcaacacaagctcggtcatcaggccaaagatgaatcgcacgatgagcccaagcccgacgcgtcgatggtgccgtttcaatcgcttgacacgagtcattctccgtcgcgagatcgttccctcacaccgcctcccgtttcggaagccgcttctcgacacaacgatcctagtgcttggcagatacagacccgcgatatgctcgacgtgcatcacggcagcaatgacctttttgaacgcttcaccgctattggcaatggggtgcttgacgctggaacgagcgatacagatcaactcgattacgacctcagcacctggatcgacatgcccccactcgacgccgaagtcgaagccgctgccccggcacttccggaacccgtcgccgacaaccaggacatcaagtttacgctcgacgagatgaacctgcttcttcatctcactcagactcaagacatgatcgatttcagtgaacagaccgacgctgccgtcggaaccatgcccatgcctgattgggacccttctagcccgtggtcactgccaacgccaagcggcggttccatcagtgtaccgaagacttggttggacaactcgctgtccgcagagatcgctggcgattcagggcaaacattttgaccaaacagcgacattccagacgccctacatacgtgtattcccttgacactttcagctttaatacccaatcactgtaatgtcatacgcaccgctaatgtcgaccacgcttgtatcccttatctgtatcggcttgactcccaatgaccatgatacagctcatttatgcattgtcagatgctcgatctctatgggcggcttccaagaccccttttgtacaaaatgatcgacctagtgcccacgctctcaatgcgtcttgcgcttcttgtccttcttgtctgcaccgtgaccatccgccttgccacgacggcccatcaatcgctccttcatggccttgatcgccttgaaagtctcgccctttcgatgttcatcgttccaagcatccaagtcgaagtattgaggtgcatactccaacaacctacgagacgagcaatataagaggatgataatacgcctagcattcacaaagacttaccattcccctcgaatttccgtaaccgttcggatgaactgtgcattatcgtcaacttcagcgcccagggacagggacccacgatcccacgggagacactcacatttgctgtcgtcaaaacgaactcgttgtagatgacccactctgggttggtgtccagaccgcacgacttgtgcaatttgacaatctagcaagcggacgaggattatcagtgggtgtaggtatccaagtcgtcaggattaagctgctcacctgaccgtccttgacagtattgtaggcccccttctctccctcccgatgggcgacttgcataaagaaaccaacagtaagagcttttcggatattgatccagtagttcttgtcctcaaatgcagtagataccaagtcgagatcgtattctgagaaaaggggggcattgtgaataattttgcaggagcgatccaggacatgagcgcgttggacttactctccatcgaccttcgcagttgagctcggacgttgtcggcttgttgcaaagacctctgcgacaggaagttgttccacgcccactgtttgtcgtgttcgtctgtagcgccaaggtccaaggcaaagtcagcttaggagaccactacgaccgtgaaatacctgtaaaacttactcgacttgaaagcgtggtatacgttcaacattgtcaagtgatcgccctcaggatgcgtgaattgagccttggccatatccgcttccttccgagcattgttgggtcgaacaaagacgttcggtactgtatgataccgcggaaagattagggacaggctcgaaaattggcaagctcgcctggccaaggcttaccagacagcatcgcggtcaagctcaagatctcattactgcatccgaactcgggactgcagatcaacatcttggccagctgttgcagtagaaaacaaaggacaagatgatcagcgtattttcaacttcaggccattgtgtattcgcttacctgaggatccaatgggaactcggccatgatctgtcctagtggagtcagaccaccttcatcgtccaacgcggcgaggtagttgagcagctcgagagcgcgcatgatggtctcgggagcgggagcatctgcagaatcgccaacaaaaatgtcagtcaccaattcgaatctggtctgaagcaacccgtgcacatacccatataatcgaaatgcaccaagtccttgataccaagcttgaccaattccaagacggtgttggccaggttgctcctcaagatttccgggtgagtctgatcctccagctcccggacaaagtccttttcggtatacaacctgaagcattttccgggccttgtccttcccgcacgaccggctcgttgttgagcgctggccttggagatgggcgaaacgagcaatgactcgactcgaattcgagggttgtagactttttgcttgaagaaaccggggtcgaccacatagacgataccgtcgattgtaagcgacgtctccgcgatattggtcgacacgacgacctttcgcccaggaggaccttgcgggtccttgttgtcaggcgcgacgtcaaagatccgttgttgttgctggggtggtagcgaagagtaaagcggtacgaccaggatcggaccggcaagtccattctggcagagttcgtctccctccgccttgatccttctgcacgcgtcctcgatctcttcctctccggtcaggaacaacaggacgtctccggcatcctctgcctggtggatcatcagggtcgttctgatggccgcctccaggtagttgggttcaggttcggcagtgtagtaggtctcgaccgggaaggtccttcccgagacttgcacaacgggagccttgccgctttccgtcccatctccaaagtacttcgcgaacttttggatatccagcgtggcactcatgacgatgatcttcagatccggtcgccgcttggcgatatccttgagcaaacccatgaggatatcggttgcgagagtacgttcgtgcgcttcgtccaagatgatggtgctgtaacgctcgagctgagggtcgttcatcgcttctcgaagcagcattccgtccgtcatgtacttgaggaaagtcgtgccagcctcggtcatgtcctcgaaacggatcgagtatccgacctgctttccgagaggcactgtggattccgcacctatattagcgcttgttcgacaagctttacgaccgatttggactcaccatccatctcatctgccacacgcttcgccacactcatggctgctactcgtcgaggttgcgtacaagcgaccatcttgcccttcaagtgaggcaaatcggcataacagacgaattgtgggatttgcgtcgtctttccggaaccggtctgaccttccatgacgatgatctggttcttgttgaactggagactcccgaaattgtcagcggtcggtccgaccgagatgtcactcgagctgacggagacgacataccacgtcataaaactcttgcatcttttgatacacgggcaatcccttcctctgctgcaagatcttcctgtagttggccgagaacggctgcgtgccgtttcccttgaaggggttgacgtcgccatccatgatctcgtggatcttttgcagaccgacagccctgggaatgaggccttccaaggggtgcttgttgctagatgacgaggatgcggaggaagagggagacgcattgtgaccgttttgaggttggaggtgagcgctatacaagatggaaatcggcagattcagggctggttctcagactgcagctctagctctcggagtggatgctatgtgtgcctctagaggaggaaggggtataagatcactcacaggtaagggttgttcatggcgtcaccgtttccatccaccttggtcctctttgaagctcgttcctgagccattttgatcctagtttgatgggagtttcggaggattgctgagatctgtcagctctaaatcgaatgattcgaagactgctcaagttgatatcgttgcgactcgtgtcgtttatcgcctctgacaaccgtggctagatgttcaaaggttgatggttacgatggtctcgatgcgcttatcgaaagtattcctgctgcttgcgctttaatttggttccgacaccagatacagaattctctacgcgctaatcggaaccagatcggtcgcttgtttacaatgtcacctactgcctgcctcgagacctgttgttgattgaagcttcctcatcttcagaagtaaggtaatatcactccaggttcattccagtgagcagattcaattatctaggccaagctatatcaaacagtactgcccgtcttcctcgtacttgggaaagctgttcctaatgctccccatcgcgaccggcttgtccttagcggcactctacgacgagcaagaagaaaacgcaccgaccgaaccagcttcgtcatcagatagaccacgatggactttgctgcaagattacgacagagtgacgccttcagacttgaaatgggaactcatgctaggaagagtccgtatctcgacatgggacatgtcggacgtagctcatcttccttggtgaacactttaatcgctctgattacagtcgtggaacgaagtagcggcccatctttcgccgaggaatatcaatatcaacaccgtcaagccaggtagatatgaacaatcaaacatcaccattacgaagaatatcgggaaactcacctttactgctttgcaacagcctcgccctcccagacggcctcgctagcgaacatcatgaaatcatcatacgacgcacctcgcttgctcgtggccaactttcttggtgagtccctattttcgctgacggactgtcaagtcaatccatcgtccgactaacgaactggaactcttcaaccgtagacgaggtttccgcttcattctcctggatcgaagccgatatcaggcggtccatgcaacatctcggcgtgagcggcgattctgcttgtaacggcgacaagaacatgctgacgaaggttgatgggcaggtcaccaccttgtcgaaaggttcggacatcaagcttttagaagtcatgaatggactctttgataagcttcaccgatgggagaaggaatggggtgcgggtatgaaatggatcgatagctagtgagtggttctcccgctcagatggaccggcctccggctcactctatcgactggccgatgtgccgcgtttcattcagctataagccacctatcgcccctaccaagaattactgccaggtcctgtttcgaaaccattttcaagcgctcttgttcgacgtccttccgtcagaggcattccatgactatctcaagagatatttcagatcgacagtgccgcctcttcgccctccacatctccctaccagccggagatgcgagtttactctccccaatcgatacctatacaggatcgggatcctgcccaagtacgcttcgatgctcgctgacgtggcttatgaacagctaggacgggtagtccgaggcgattgggacgtactcggtggggagccagacgaaacggatcgcatggaagaggaccaagaagagggagaagagtggaagcacaagatcttgaaaggtctcgaagcgatcgtcaagcaagatattttgggatggttgtttggttacatcgagggtaagtcagagatttggcgttctactggggcagatgaactctcgggaaaaaagacaatacgctgatcatctcatccccattcggcctttgcttccatatcatagccggtggaagcaaggatgaacatcgcaagaataatattgaaacgcggatgaagcaccgcttacagatggacttttacgatcatcggcgagtctaagcatgccagattccgtcccatcaagagaaagactgatggtaaggaagatctagatgccagcagatattcgatatcattgtgaatttcccgacatcactcggggctttgacggatatgcaggtgagcactcagcttatattggcaagcgccctgcaggctatagacatgatgctgaccctcgaggtcgatctggacaggactgcgacgcgcttacccatggggtcaaaagagcaaaactcgccccgatactggttgaatcgtaagctacaggcgtgtcaagtgaaatacaccgcagatggaataacacctttccggctgtaggatcaagcagaggctcttacatccaggcgctgaaactaaggatatcatcaggggatacatcctgatcatcaagtcactaagggtagtcgacccccctggagttcttctgcacatagtctcacaacctataagggcttacctcaagtgaggattatcgtttgtcatttagaggacgatttctaacgattagcctcgcacatagatcaagagttgacgcggttgcgagtatcgttagcatgcttgtcgagacggacgagctagcagacgagagcgaccagatccgggggattcgggagatcaacatcaaacacgaactggcagaggaatgggtcgaccacaagtgggagccagaacctatggatgcggcacccggtaagccggagatctgggcaaattcgatacccgccaagcagacgataagctgatcgacgcataaattcgcggttcagagttccgcgccaaaaaggccaacgacatcctaagcattctggtcggtctgtacgaggctcgtgatgtgatcgtgacagagatccaaatgtggctagcgagggaactgcttgccgtgaaggagtacgattacgacgaacaagtcagtcagcaaaacactagactcgctacttgcgcgcaccccggctcaccgattgacggcatttgaacagttcgccaaagtagagactttgaaaaagagattcggagatgcgaccttgcaagtgtgcgaggtcatgctcaaagatatgaccgattccaagcgcgtaaacacgcaggtacagcgcctggaagaggtatgttgacttgtgtcccgctatgcgcaatcgacgatactgagatggttctctatcagagtcgacttgaacccatcatcttgtcacatcactactggcctggcgtagctgacaagcgtttgaagcttccgcgagcgctccgccggtcagtcgagctgatcatgagctccacccgatcatgactgctgaaacagattgtcgtccagcttgcaaaaacgatattccagcaaatatcacaatgtcaagcaagacaaacacattgaattcttcaacgtgctgggctcggtaagactttctatcgattttagcgatcgtgtcgtgatttgcgaagttaccccgcttcaagctgctgtgctcgacgccgtttcgaaaaagagtcagtaactttgtcttctagaaactctgcttcgcactcatttgtaccgctcagcaggtggacaaacgtggcagggtatatcgcatcgcatcggaatcgacgaagagaaaatagtgaagcacgctctgaaccactggattaatcaaggcatattgcgagtaggcgatgacggaacttattgggcttcggaaacgcaagcggacgatcaacaagagccatccgtgctacgtgagtgcgatcattgtcactgaaaggttgtttgacgagtctaatcgaaacgcatgttaccagttgacaccgaagaagcggtggtactcgagactcctctcgagactcgtgccgacatggtcgagcatcgatgggccgtaagcagagttgcagccggtgcaacccaatacttcataatgcttacccgccggaccatttccttttgtcgcgacaggaaattcagcgtcagttgttcaaccgaagagccttgtttcacgtcgccgttgctgaatacaccttacatggcttcgcaggtctactgtctggtggcactagctttaacactttcattctccatcgattgctatcgagagatccgtcatatgtcaacaccaaggaaagcttggagcgcttcctgggagtaacggcgcggacaggcctgattgaggcgaccgccaacggttggcgactgccgccctcagcttcctgatcatcctgcacacaacacgaaagtacacttgcgtgtcacgtccggtcgtacgcttcacactcccacggctaccctacagagctattctgtcgaaatacatgattatgatcaaagatgtgggacccatttgtatatgatgttgactcgagccttgtagccgattcatatacccaatcacgtagcaatgccgtccactatcttgctcgagcctgtctcctagccaagattgatatgcggcgccgcaattccgcttgatcattatactgatcggtacaacgtaggtgtcgcatcgttaggcgatggtcgcggcaatcgtaccgcccacgatcatccgagcgatgtctacacagctcaaacgctgctcgcaaagtctgcatagatcaaggtagcgaatccctccacctcggacaaacccagggtccgctgcgattcgccaaccacacatgtcaattccgatcgcagctcgtaatggacatcagtatccgactcacttcgacggcttcgtctgggactcgagcccacacggcacggctccaggtggtcaggaacggcaaacattcaaccagacgttttgactttagcgattcggcgtgtgccgtatcgtacagttcgagcccgtggtctgacggatcaagcaagacgatctcgtcgtagacctgagtggcgaattgatccagacaagacctcttcatccgatcgtagcatgaagccagaaggtaggtgaagtcggccgagcttgcgtgagacgaggtctggtccaacagctcggcaagtgggctggtataagggggcatggggatcggacaagatcgttgcaatccgtgtttaatgagcagacgctcaaattctgcggggtccgcgggagggcagaggagatcgtggaaactgtaacaagaaagctgtcagtacgcgtgttttccgtgtcaccgtgccctcgtctattcccgctcaccctgctccaatcgccccatccaccttgagcttgacatcgtccagcaactgaagccaatcggccactgcgagctcttttttcaaaccgactctgcaccgcatcagatgtcgatttgatcagtccctatcacaagttggggtcgaagagaagccacttacggcttgaagacttccaccacggcacgtcgaaccgtctcttcgagttccctccagccgatgtgcaggagccaccagctgaaacagaggaaattccgttccgtctcgacgtccagcctcgagtgcaacggtgcgacggtcgctgccgacgatggacgagcggcggtcgacccagctgagccgggtgtgcccaagaggtaagacgctgtggatgatcctaatgaccagagccccgagacgatcccaccagggtgaaccggttcggtctcgccggaccctgaagacgtgtactcgtccaatcccatagactcgagcgagaagtacttccagggggtcaaaagccccgctacgtcgcccgccgctttccccactctcgaccgcatcggtgccttgcgcacgggctcatctcgatcctcgtcgtctgacggcgacgaggttcccgtgtccgacaggtttcgcaagtgatgtaagcgcgccaagagggtcaattgggacgtggtctggatcgtcaataggggaacgagatagaacgtgagtatcgtccgggtaatagctgtcagcagtgagccacgcattcggaagaaggagaagcggggaaaaacagggccatcaggtccagagtcagcgagggttgttctggacgttgggagaagccctagaaggatcgcgtcgacagacggcgagtaaagttgttgagactcacactgcaccttgatttcggaccataactgcgctttggtcttgcccggtttgacgacggagggtccgtcccgcttgtcctcgtctgcgacgttgcccgaacgcaagacgtcggcgtacgagaacccttgaccctcttccgctcctaccggcggatgaacgctcgggtgctggtacgtccggtcctccctctcccgaacgggtagtgatcgtctggatcgtctcggactggtactggggctcctcaagtacctcgactcgggtgacctcggaccgccaaacgctctcccttcctcctgctcttctccccccgtgcccctcgctcgatcgggatcccggtccggcgaagtcgagccgggggaaggctccgtaatgttgctcatcgatgtcgacatgtccgtggccgtatccacgtcgaggtcggaatgcaactgctcgttatgcgacgccggggtatcgaaagacatccctcgatcccccgcagctctcgccctgtcctggagatcatgttcggccgagtacgtctcttccccagatacggagacgtcggtggatggacccggacgggcggacgaggatgaggacgatgaagcgacgaattcgctcgcccagctagatcctatcccacgagggtcgtccacagagaacccacgcgctgccgtcgactccgttgtattaccatgtgcctctaaagggtcgtgctcgtggtccctctggaaatcgctttcaagggtcgtgctcgaagcctgactcgtcatctccgaggaagacgtcggcaagctcggagcgacgtctttgggcttgccggcgaggtgctggagttgttccgtcagggattcgacgtctagcttttcgatcacctgtaaggagagggtgggaatgagggcgtagacggtgaatgtgatgttggacatggtcgaggtgaaatgttgcttgaccctgccgcacacgatcagaccgttcagtcaaatgccacggggatcgatattttgctcttcatcccatcccggagagctcacctgtccgcacgctgtcgatcggtcaccagcttgatcctggcctgtctcatcctcgtggcgatgtaacctaggacgacccatatcgtcacgccgaggccgagcgcaaaggagatccgatggtagatcctggccaggcgtgatcgtgggggtggaccgggggtaggcatatccgcgagtgtgttgtaggtctaggctggcggcacaaagcggagatcagggtttgggatggtggtcctaggttgtttgcatgtcctacatcatcgatcatccatcatcgtcgtcattcgatcattctacgattaaacgctgccaaattacctgtctgcatgtctgctttgcttcggtgacttcggttacttgaacgcgcgcgcaacaaagtcaacctgacattatcatccaacgttgccagccaggtacagcctgtttctacctgacacttttctttttctttcctgtcgatcgacccgtttcgtcatctcgatcctcgtccaggagccgatcgtcactacctctttatcgatagacgaggtatacatgctaccctgcaacaacttgcacacaacaatctttcgaccgacaacacgatcaaaacactttttctccatcatgccaccacgaccacgatcaggtttacaaaaagaggtcctctccctctacaggcggtgcgtatctactaccccagaccaccccgaaaccctcgtctctcccggccgatgcgactcaaaaagacaccactgatactcacgccgtcgaccaggtctactttggccccttcctccgtaccctgatctttcgcacgacccaacagcggcctacagaacgtctcgacgaaacccgacgagacgcgggagaatttcctgttacaccttcgttactcgttcaggcaccccgagttgagcgtcagggatcacgctgccatcgaacatcaagtgagtcgtcacggcctcttcccccctctcccggtcgaacaacgtcgctgatgtcatgccccgccgccgccgtcgtcgtcgtcgccgttgtagataagacgatttacccggaccctggacatgctcgaagaaccctcggtgaggcagatgagcgtgagcagggagatgatcgattggtgggacgcccaggtcggactcgccagggaaaagcagcagcagcagcagcagcagcacacgaccgcgtcgacaccgacaccgccgacagagcctacgagctcatgagcatgaaatccgagccggggcgggcgagagagaggacagggtgggttgtagggcgatcacgatcaagatcgtcgggcgctttcggtgaggatccgtcggttcggaggggaaagtaaatggcagcgagtgtgtatcatgacgatccgacgaagatatggaatgaagcgagtgcagagcgtcgcaggaactcctgcccccttagtcccttgtggaagaacttctctactggtctgcgctatatctgccaagtccccgtaaagccacactgcatgcatctcgctctgagaaagtatcccggtgactcatcgagtagcagcatactgatcagtctcattggacccgccgcccactgtcggatcaactactgtacacacacgatcgatacgccccgcctcagacctccctcgtcaacacgcacagaccctcggtatgatgcgtctgcgggaacaagtcgatggcgccgaggctgtcgatcttgtaccccttggcacctccagcattgctgttcctgaccaactgcccaacatccctggccatcgtgtgcacgttgcaactgacatagacgatccgcttcgggttgaacctgacgacttggccgaggaaaccctcgtcgcatccctttcgaggcggatcgacgatcagggtcgtcttgtccccaggccaggcgagggacttggtcaccgtatcgaatagcgactcggaggcgccggcgtggaaagaagcattggtgatgttgttgaccttggcgttgtgacgagcataggtgatggattgaggatcaatctcgatgccgcatacttgggtactgtcgaatcaaacaggtcacgtgatcagacgacagccaatcgactgaatacatgtccagaactcacaagtgctccgccagggtcaagctgaacaaaccactcccacagtatgcgtcgaccaggtaggattccttcttctcttcggaacccttgtcaatttgatcccgcgcaaacgatgtcaagggtcccaaaatggacgcgttgttttggaaaaaggaaccagccgggaactaccggcaaagtcgagcatcagctggtgagaatgggcaaattgaattcaggatgacccacttgaaagatgatatcgccgacccgctcagtcaccgtatggctgtgtaccgagatgcacacatgctcttctggcgacttgagcttgacgtcagtgctcagtccgagatcgacattcttgcccttgccggtacgtttcggtgcgataacgacctcgggtatctcctcgttcatcccttcctcctcatccaccactccggcttgtgcatccaccacgaccggggcatccttcttggtctcggctagcccggccggtgtctcgggcacgagcgaatctcgaagcaacaatgtcgctcctcgtttgtacgatcgaatgttctgcttgacagccgctcgagccgcaggcatggcgttcatgatcgcctcggtcgcgatcggacagacctcgatgtcgaggatgccgggtttacatttcccctcgaaccctatcggcgtgtcgagttcgacaggcatggcctcgcccttgttcccagtctcttcctcttgagcttcggcttcgagcgcgacattgttcttcttggcgccgtccaacgcctgtcgaccctttttacccgtctgcaaagccttgggcaggtcaaagtgcggggtgatctttgtcctatagttgtactgcttcgggctagggatcgtttgcttgacctcggggatctgctcagagggcaagtcggcaaagtttttcatggccttgacgagaacgtgacgtttgagggcgagctgttgttcgtacggaaggaactggtactggcatcccgcgcaggtcccaaagtacttgcagccgacgagcgaatcatcccgcgtcgtctggatggcaaaggtcgatacgccggggttggacgagatgatctcgagcgggtcggcaaacgagtgatagtgctgatgccgggtcaccttggctttgacgacgtcgccaggcagtgtaaacggaatgatgatggcccattgaggtttctcaggggccaccgggtagacggcaattccatccccatgcgaggtcaaggcgatgaccgtgaattcagcttccgtgaatccccagtctttgggaccttcctcgaccttggtcacttcggtcgccttgtcgacgggcttttttcctcgcatgttcttccacgccggagcagacttgggccatatccgttgaccaagcgtttgtgcttctgatggaggatcagtcggttggggaagctcgctccaccctaacgtcgacaggagatcgtgcagcaggacctcgtcgatcgggggtgacctcctggacttttgcttcgagtccctcttggctgcctttttcccgttcccgaccttttcggcgggaggtaaggcactaccagaagcctgttgcacgggttcggcaaagtcggcatcaatggtggccaccttgacctttttgtgagcggtaggaatgcttgcgggggagggaggtgaacgggggaccgagatggaggacgacattttgcgaagcgagagtttgttgtgggatgctaaattggctgtacgtgctagtgttcggagtgcggctcggccggatagcatatgcttgtcctgatgaagagcgaattgagagtgccaacgttctaacccacgtcgttgtactgccgaggtcaaagaaaggagcaagatgccaggtacgatgaatcttgaatggacgaatcccgtggatcctatttctcttcgaaacgaccgaaacggacaactttcgcgtcgtcgcgtctcaaaattattcagagtcgatgaggcgtaacgcgcgagcgacgagcaaagtggcaagacacttgttgtaatgacaaggaggaggctcaagaatcgggccgtagacagaaatatggaaggagggaatcatatagcaaataaaagtagatacgggtacaaggaaaaaagagacaagcgatgagcggatcgcgattgatggcaaaaaaaagtaacgtagacatgagctcaaggtcaagcgcgcgtcggagtcaaggtcgcactcacgggcgcagtacaccccccctgaactacctcttccggtagtccagaggcacgtccttccgaacatgtcgatccgttacgcttcgttcttagccgttgtgccgatcccgtccatctcctccgagaaccccggaccgacgactttgattccaagtctaacgatagggcgaacctactgccggagaagtcaaaggtcgcagggtccgatgaggggggaagatgggtcgtacgcggggagatcgagtgtcgtcaccgagctagtcgtcaggccgtgttttatatgtatcttctcctcgtccatcttctcttccgtgtccacttcgagacggtccagtccctacgcgaaaggattggctggatctgagctgaggcccggtaccgccactccgatcccgaagagtcgccgaaccgccttaccggccttggcgatcgcttgaggcttggtgttcttaatctgtttgcgaggagcttgaaggaaacgattacggtgagccttcctgacgggagccgggggagaaggattcgaagcgacgaccacgaaagactcgatctcctcttcctttttctccttctcttcttcgacgtcttccacgatcacgaacgactcttctccttgcaccatcacgaacgactcttcctcttcggcttcttcgacgatgacgctgaggttttcgaccgaagtctcgaccggcgcttcgatgattttctcctcttcgacgacgatctcgtccgacttctcttcgatctcctccaccttctcctcgacgacaatagcgtcctccttctcctcgacgacaatagcgtccttcttctcttcgacgacctcctcttcctctaggtcctcgaagacacacaacttgggaatcttgggaccaacggcgactcgagcccaggtgaactcggtgacgtgctcggccttcgtaaaggcaacgggcgccgcctccgaggtcggcctggatcgaaggaccgaagatcctgcgacaccttcagttggatatatcatagtagtagtttcgacggcgttggggatgacgacgacgacgagagattcagccttgacggtcttcttcttgtgcaccttctcgacctgcttgcgcgaggtcgacgaagtctttttgtgcaccttcgaagaagcgacgcggggggcgattggcgcagcggaagtaggaataggagattgcgccggaacaacaggaacatacgacttaagaggggcctctcccctcagaccgatcatgggctcggccgggccatacaacaccctgtccatcacttccctcttgcgtagaatggtcgctcctcggtaagtggtccgaatgaagttcctctcgtacgactccgggttgacgttgcgttctacagttcggtagtgcatcatgatgacagttattgtttagtaaaagaaagttcgttggtggtttcgtataagtttgcgtatgcgagtgtatgaacgagatttcttgagagaaaaagaaaaaagcaagatgcgaaaagagaaagggagattcacttttcgtcgagtatatatcctcatcacgggctcgcccccctccacgattttcgctggcgacctttgtttttcgttgacatccgccatccgggaggctggtttctttttgtgcaagtaagttcgagtctctgtcagcaaacgatgtcatggaaggaggtacctttgcgcctcatgaactcgccattctcaggtcgcctggcggaacgaacgcgggaatcgtattgtcgctttggccgtatgcctcaaatcttgtttctctagcgtcaatatcaacctcgtacctctatggcaggaagaagagggagataccggagatgattgggatgagttgcgatctggactggatgacttgctccgcggcacgcgcttggcgcaatagttgccattgaacgacccgccgtccggtaaaggttgcaaccgaactcggccgactttcaaagacagcttgagagccagaggatatgcgagtttagacgttgacccgcctactcaagtagatggcactttacaaccttgacttgcattgatcataattatcgcaaggaacccaactctgtatctcgcttgatgcccctcggacagtcgtccgaatcgagattcagcttcgtcggtcaagcctcatcgaccgcattatcgcctggccttggttgaatcaccctagttacaagtgtatcacttttggcaagtgtttcgggcacctcaaacgaatagcgatgttccggctggccgtgcaaaagtcgaaacgatatccagtccgtttgtcgattttgttgacaatgcccgaagcatcgtcttttcccgcattcgcgcgcgggcattttgggtctcgactcggattcctggcattaattacgaagtcgatcggactatcttgtggtgattcccacgggcacgaacttctggcctagcagcattcgtcgcgccatgttgcctgccatagacgttctaatcaatggtgcttaaaagctttctcaagcgcttgatcttcacgaccagcatagaaatcctttctcgaaacccatccacatattcttgtggaaatcgccatagttgcccgttgtcgaattcatctcctagttttcgagagtgtatcctcatcgaagaagccaggattagagttccgaggcaatacccgatttattacccgctgcaaggggcagtaatcggctggaacggtcactggggctgcgtgatttcgcattgggaggaacgtgtgccattgaaatgaaccgcaatgagcaggggatggagtgatgagcagagctagcaagctggaacgtcagggcatttgtgcacaggttcagatatgccgagatgtcggtatcatctccactcctaccttcacaaggtttcccctctttctctttgccaggtggctgcgcgcgcaaatgtcgaggcggtgcatccacaggcaacgagacctcgaacgattcctagcgctgttgagatatcccgagacggacaagaaggtctatcagccatacacagtaaacgccctcgtatacttcaaagtatcgctcctgctaccctcctcactgcaacccgaagttgatccccggaatagccaagtcgacatcctcgtcaaacctccgatcgaaaatggaactcggcgcgaaagacatgagattgtcgggcgatgctgggcgtgagccgtacgacttctgtttgtattaaatgcttcagtctgcacccaccctacggtttcataacatgcccgccccaaggcgtgattggcgcttggaatggatgacacggctcaaacaccgtctgtaaagtctgagcacgcatcatcgagcgcggaatcaattaccaatctgccgaacactccacgcgcggtctgctcttgtaagctagccagccacagccaggccctttttttggcaaatactcgtcatttcccggttcgatcgccattgtcagtcgtcgccctcgctcgcactctctctctctctctctctctctctctctctctctctcatcccccccccccccttccattccatacaccatcctcgatgcgactcaccctacctcgacgtcgttttcgttggtcagctctcgccatcgtagtcgtctttaccctcgtcttcttaaccctcacacccgagtcaatgaacagcagcttgcgaagactctctcagctccgtgcccatttgctttccgtccccactccgctcagtcaacctagacaagccttttcgaccttatcaccctcgcacgagaccgccaagataggtgccctaccctccaccacccaggccagaccagtcagcacttcagccactaccatgtccgactacaagaacgaggtcgactctgccatcaaggacaactttgtcatggtgttcagcaagagctactgccctgtgagtcgcggacctcggtttgcgtcggtcttggaaccgttcactgaccgtgctctgctacgacgtgtgaatagtactgctccaacaccaagaaattgttgggagaggtcaccaaggacttgccggcccagaagaagtacaacgtcatcgagtacgtgtccctccgtcccgattcatgacgtttggcgcccatcaagatcatgactaatcattcgttttcacttcgatcgcaggctcgaccagcgagacgatggcggtgacatccagtcttacctccagtccaagagcggccagaggaccgtcccccagatttggatcaaccaggtcagtctcccgcgtcttgctggatttcgcccgtcattcaagccgttcttgaccgcttacaaatcacgcgttatcgttctcatctttgatacagaaattcatcggtggaaactctgacttgcaggacctccgtggatccaagttggacaacctgttgaaggcttgaatcctggaatcccgattgtagtgccttatagtctctaaatggaaatcatctcgcgacgttctgccagtggattccaggcatgcgcagtcttacagctacagcaagtctaccatggtgtattctcgagcatagagaatcgtaaagggtcgtgggaaggtatctctggtcatgacactagaccgaggactaggtgagggacaaggcgaactcgaacccgttccaccagtaccacacgagcactgcgaagagggagatcatcaaccgaccgaatggcagttgaacgaccgacaagatccatagcgtgaccactggtgcggcctgtcatgcaaacgataggcatggtcgtatcagcacgagatgagactgttctaacgaggtcaggcattggtaaacaagaggacgacgtacctgtttcatgacgaccgtccagctcgacttgttcatcagccagaacaaacggcacccggacccgaacgaggtgagcatcaaaagtggcgcggtgagcgggtgggcgtgatgtcggttggctatgattagagtggaaaacgttgaggaacgctgaaatgagcatctacctgacaggctagagccgagcaggactcactgagaaagaccaagacggcgatagctgcgaggcgagacaaattcagacaatcatgagattcacagctcagaattgataggaatgtgcgcacggcacgtacttggaactgcggatgagagcctcttgacgtagtgcatgggtccgggattccgattaaaagacatgtgtgccaggctgtcccgtccaagcaaagcgcatgatcgatgcgtcgaagaaaccgtcatatcgcgagtgaaacaagagtttgacagtcaacattcgtacgagggcgtcgtgagcgtgaaaaagtggctcggactgacaggtcgaataagaggtatagcgaagcaagcgggatgaggtacataatcatgatgaagatctcatccgaaaggtccagctctgaagtctcggtctgaccgtcggcggatcttttgatccctgtaggaatcttggtcacgttcttcgcggtctccgggttccagggcccattgggatcgaggtcgatattgtcatcgcgactatcgtcctcgtaagctctgtcccgatcgtgatcttcctcttccccgctcgactcgtccccgagcgtgatctcctcgattttagctccaccataactgttcggtatacgtctgactagcggttcattgatgggtttgcgttgtcggatagaagaaggatgttgcagagatccggcgggaaggatgccgctggcctgggcgagtctgatctgttcagacaaggggatggcttcatccagtaccggtatcgcgggcgacggtgcgtgtcgagtggctttcgatttagtcatggtacactatatgatagctgaggtcaggcagtgaccggcactttcgattctgccggcggcgggtgagtatcatgatcaaaactagttgagcggtgtgctagcggtaaggactggtaggcgacatgaactttggtttgattacgtgttgagggagtagtcattcaccatgacaacttgtatcacgtgattgactaggcataccggcatctttgacctccacctttgccttgccttgttgtttgtttgtagagtggaaagtcgatcaaccggattcagacggcagcactctgctactctgctacccactccgctactcacacacaccgcacatacaatcatccaccatcatcatattcctatccactcgttcgaacgaaaccatatcgcagtctaaaacgacacaccacactaccgtcatcttcatcactcgccactcgttcttcagggtacacagactctgaatcgaaacgacaagttccctcgttggctcttccgttgcatacactgatcgcacacgacaacaacgaaacacaaacgacaacatctacctcgcttcttgcactcgaccttagaaatcagtcactcatagacactcaacgacgcaagattccatttgaagagattgctttcaccgacatgacatctgcagcgccacccaagatgtacacggcccaggataaacaacgggcagtggagaaatattctgatcagatcacatacagctcgaggtattccggtaagctccggaaagactcagctcgcaacaaatgttcgaactaaactcggatcacctccgtcttgtttgtcttgggttcgtaattccagatgatcaatgggaatatcggtatgtccttcttctcgatttgccttctggacccgatttctgaccgtactatccttcctttgacccttagtcacgttcatgtaaatctctcatcccactctcagcttggtctcactcatctcccacgacctccgtactgactctgaagttcttgtcccgatgccacagatcccaaaagcgctcgtcaagtaccttccaccgggtgtcacctcggaagccgagtggcgagggatcggaatcaggcagagcgcagggtgagtctcgggatctttatccacttaaagtcgatcgatgagcgagtgcaaggcctcgttggcagctaggaaacgacggctaatatcgctgcgctcctgttgttcgtgtttgctgtagctggacgatgtacctgcgtcatgctccggaacctcacgtcctgcttttcaaggtgagctaccggtctcttcatcccatcacctgtactaatatgctaacatcgcttcaacgtgccgtcgagacgtttagcgggacaaggattacgacttgaaacatcctcctctcagagaaaggactgttcaggggcgggcttgaggagcaagcctcaggattgcctgacctttagtacaacccggctccaaatctcggaccagcaactataccggacgatgaggttccgagaagaggtcacgatacgggaagaatcggaatcggatgaattgggggaaggtggattcggagcggaagatgacccccggaacggcacaggtcgtcgcgggggagactcatttccggacaaacttaacgatattacgacgcatggacatgatgcaggacgcaagcagtcgccgcgcggaccggactgaggttcattcgagacaacccgtcttgacatggaccgaggtagacttgggccgcccgaaacggctttccgttagacctgctttcatttacctctttcatttcttgccctgttcttcttcctgcctttgcggcagggggaattgtaacgacagaatttgtacgactgcatgagaattatctagcatatcaagtcaggatggctcgtgaagatgccgagcaatcactcgtcggcaaactgtctttctcacaactggtgcacattgggtgatgagaggtagtcgaccggttgcgttttgcttccgcgcctcaactcgagagttggatgatcactcaacggggtttgctcgatcgaggttgtcgtgcacatgtaaacttgaaatcattaacaactcggctcgataccttatcactgatcgccagcacttaggagtcaaggccgatcggctaatttcggatgcttgatcttcgacgtaacccgactatgcggtgatcaacccaagcgaattgaatgctggatctgctacatcatgcccaagacccgatctcagaaacgagcggcttctcacgtcgaatccagccctgctcagcctgttccggccaagagagcgagacagcgctcatcgaatgccattgtcgaggttcctacgattctgcccaacgtcacggtaaagcaggacctgagccaatctaggaaaggcaagcagcccgagcgaccgtccgcaatcccgttcgcacctcgaccgaaggacaattcggatcgatgtcacgtctacctagcaggaccagaggactttcgctcaggcctggatgagcaggagaatgagcggctcgaagtggcggcagaggatttgctggtccaggggaagaaactggcagcggtagagatgcaggacctaaggtggagagcggggcttgagcgtgccgggtctcgtaatgaggtcgaagatctaccatggacgggaaattattggaaagtcatcgaaatgaaagagtttgatacgattagtaagtctgcgtttgtcgaattcgtcaagtgtaatgacgcctgaccgattatggacaagcagactacttgaccgatgcaaggacctggcgatactcggcgccgccgctgcctacagctttggaccttgaagtcaccgagtgtaaggtaatggagcgcaaaatggtgtcggtaagtgctgaactcaagcacgacatgcgccaattcagatgctgatcacgagctttgttttgcagaatactgtcgggatacccgaatggcgaagaacgtcagccgcagaatcgttccagctgtaccgaccaaacaatgtctcgacatccccaccccaagagaatgactcgcacgaccttcttgagacacctttcaggcagatctctgcgcctgatcaaggtcccacaatcctactgtctcccctaagcttgcgtggacctgtgcagccgggcggatcttctagacttcgttcccaaccaccagacctggagtggctggatccggaactcgataatcttcctgactttgagtggggttgggacaagggtcttggtaaagagcaaagcgatacacaacgggaaagcttgacgatatggcgtcaatctctcagcggctcacacgagcgacggtcgggccaggcgacatcggtgctagctacagagcctttacctgatccatcgacgaccgggatgatatcttgcctaacggacccgtcgatcgtcgaggagaccgctacacaagctggccaagaaagcgagaaggtggagaatttagaccctcgctatcagcggctgcctttacggctagcgccctttgagatacccgtagcccatctaccaggatcctccgtacccgcggccaaagaagcactagtgccggcgaccaagtcccggaaaaaggtagtcaagcagaaccccctggagacattgaaagacgtgaagccgatgaagcaagagctgtccccattcatcttgcgttcttcaagacaagagcgaggggtacccaaatcggacgctcaatcgcagggcattgagacagcagcgctggtcactggtatctcggtactcatgcctaatgaacggatggccgagacaagcggatgccgtttaccagacacgggagtcgttctacacgaggaggacgacggcaatatcagagacagcccggaggctatgtgcttccagattagacctgttctcgaacctgtaagaaccgagaccctaaaatggatgaaacatcaccgaaaatggacacggcaattaatctctcgtgatcggagattcgggcagtataccgacatggtacccgaagtgagcatggtgttaggcatatacaaggcacttgagctgatcttgatcgtagccgttcaatcttcatgtacctgaagacggcccagcatatacccaagtcgccaaccaagccattggcgcccctatcaagatgccttctattccacaccccttccaccctgatcttgcggctctcttgaaagctcaacccaagctgagggtcagatggacaattccgattcacgggcctgtggtcctgatgacggaacaagagatacaaaacaaattttggccctctccagctatcataaccacagacgcattggacaagaactttcacgggcaagatgacatgataacgtcagagacccgacggagaaaccgacgggacgtcctgatgtggtcgtcgagtgccatgaccaaattttggaaggaaacggccaagctgcaggcgcgaggaacgtgcggaccgatctccatcagcgtttctggtccacatcctgacccgtttcgagcagtctcgaccccatggaccctggcttcgcatcgaatgacaactcggccggatgactcatctttccagccacccattcgtgcgtttgcaggggatcacttgcgaatcggctgcgacctggaacatgcgcttatcttcaggatgtggctcggtacgaggagtttcggtttcccagcaacaacgacggatattggcaagcaaaggttgggagagaatccttttttgcgcatcaagttgtgtttgttaggccctctgggcgaggtcttggccgtcatatgacatcgttcgcccttgtccataccgatcgtccatcagaaggcggtcgaccaggtacaaatcggcttccaaacacgtcattccatcacacatcaccagcagtagctgtcttgtcttgcgttgggaaggcgagaaggttgaccatccttgcctgtaagcccaccgtcagtttcgacggacctaacgccggacgacggtcccgtcaggaatcagaattttactatcatgtctctggactgacgaatcctatcatttcctactagtctgctcgataacacgaaactcttgttcgcccagtagaactcatcatgctgtcatatttctgctgtcttacccgtacatgcgtgcgtcatgcccgaaggacgggtgatatgccctctgctgtgattcattactactatcaagccaaaatatctgccaatgccgcatcagtggcctggtcgatagggggtggtgcaggaggtgcctcgccaggagggaagaattcctcttcggccacgctggcagtgaggattgtccttccaccgaattgcctgaccagcagatagcgattgtacttattagcgcttgcgcatgatgtgactacgcagatcccgtagagcccaaacataccttccagcaatctgttgaatagctcggctctgggtcacaggacatacgatcagtcagcaacggcttggtcagcgatacttttagcgcaaactcacagctccattgatgtccttgaacaggatccaaaccttgccgacaccggcatcttcatcgattttctgcgaatgacgcaagtcagtatgactataattactcgagatttatcctactcgacccacatcgtaatgagccttttgttgaccagcggtctcaccagggttccatttcgcttctcgtttagctgaacgcaggaggaaaagtccgtaagtggcgttccggggcgttcagttccgatcgagcacttaccaggtctaggaatccgaagtccatcaactccaccgtacttctcgcactcttctcggatatcttccagaatgtcctggtagtcctgatcgtcaaccaattcctcggcagtgaccatgttcctacatgataaaaggtgaactcagctcaagaccatgccgccaggacggtggaagtggcttacatcaagagcataactcgcgacgtgggcgcggaaggcattcctgcattgttgatgatgttgggcgctggcatgacgcaagcaatcagcttgtcgcccttacgtgcgactacattcggggactcaccgagacttcgcaagttgggaacaccgggaggcccagcattggcgccagtgccaaagctggattgctgggttcgtcccgtcgaagcgcgctgcacgagcagagtccggtcggcgagctggaacccgttcaatccctgaattgccatctcggtgacggtgtcctcgacgtattcacagaaagcgaaaccctgagccggagagagaatctcagccttcaatccgctaggctcttgtttgtcaaactgctcgtacctttgaaggtccggtctgaccggctccttccttgaccaagttgaacgacttgagctccccaaacgactgtggtaggtagggatcagtcgtgtgcctgcgagaccgggttagcttttgcgtacctttaacagctccatgacctgctcatcgttgaggtaggtaggcaatcctccaatgtagatcttgttgggagtatcggcgacggttgtgctgaccacaccggggatgtgcatcgaaccgccaggtccctcgggtccgacgtagtctgcaaggaaagcgggaaataaacgtggatgagttgccgagcctcaactttgggtcaggacggtccccgaacgttcaacttacccttgggacgtcggatcttgagaggagtagcttggactgcaaagaccatccgctcagcaagatggatttcggcaacttatatcactcgaggcgcaacctacagatgattccgtcaaaggccatggcagcggtagcttcctcgggaattcgaaactacagatattcctgtcagctcacaagcgcaaggatggcatacccacgagtggcgtatcggactgacctcgacgaatgcgtagctcttttcgtggttcagctgaacgctcgtgacgggttcgccaggcatctcgacggcgaaaccttgctcccgcatcttcgagttgaagaattctgccaacgacgcctcgttgcaggtcaactggatgttgccgacgtagagacgcttgctctgacgcatcgggttgccgacgccgcccatgggtccagcggcaccggggaaaccgggaccgccgacaaagccgggcgcaccggggaatcctgggttaccgtgcatggcagggatgggttgacggttgggaccgggagcagggaattggcctgtacgtcgagcgcgagaaatgggattcagtgctgctacgtgtggcatagtcggccaagcgaagaaacataccggtctgcttggcctgaagcgcggagatgtcttcgaaaccaggaggcttctcgtcccacctgctaggtccgatcctctgcctctcgctgaggggaatggcattgtccggggtggcctctcgcctcctgttggcaagaggaccgacctcgaattctcggtcatcatccctcctcctcctgtcccgtccaccaccaccaccgcctccgccacctccacgacgatcatccctgtacccgttccctttctcctcctcccctcccccacatcgtcgtcatcatcgtcacacctcggccaccctcgtcgggcacgacggccagacccaaacgatcacagccatggacaggctaggcagtgtcgtatggcaatcgagcacgatcagaccacggacagccttgcataccatagtggtgtcgactggcagttgatgaggtggaaccctacggcgtctcgcgggggtgacggcaggagcgggacccgaccaagacctctcatgcgattcgagttcaaggccggctggggaacgattcgccgagtctagagaatctatagcgtcgcagctacatccaggacgaggccacctgatggcgatatgcatcgacagagtggacgatccccgggtcataccccattccccccatgcatcattcgatctcgccgtacccatcatcctcctccttccgaccgaggctacatgacacgccgcatcacatactgacccgccccgccgctccgtcatacgcaggtaccaacgtcgttcccgaggctcagaaggccggatggtcgtctttcatcaaggtccgtcccgttccacccgcctcttgccgactgacactgacaatggccccgcctcgccttgcagtcgctggccagcatgaccggtgatctctccagcatgaccgcccctccctttatcctctccccgacctcgctcaccgagttccccgcttactggggagaacgacccgaattgttcgccgatatcgctcagggaaaggacgagcaggagagggccgagagggtcttgaggtggttcatctgtaccttgaaggggcagtacacggtgagtctggcgcgccgcgctgacgagggtcgcagaggtcggtcttcggtggctgacgtgttccgatgcgggttcgtgtttcgtgtcataccagacccgaaatgagaagatgggttccgagaagaaacccctcaaccccgtgctcggagagtgagtccccggcgtctactttttttccttctttttctgtaattccgaacccgcgctgatcgagctcccacttggctgtcactaggcaattcttcggagtctggcccaacgtcaacggacgaggagacactcacttgatcgtcgagcaggtctctcaccaccctcctatcgtgagtcgtccgcggcactacccggcccgtacgactcgatcgcgacggctgatatcggatcccggtggccttgccgacgcgatggacgatgatgctagaccgcctaccacttggagaacaagcaggccggtgttgcgctctcgggacactcgggacagaagaccagctttagcagcggatctatcatcggtcagtcggggtctcgtgtcgatcacgcagaggcaaacgctgattgcgctcgggtccgggtcgatattgcggatcacagtcaagcagaacggacatgccgtcttgaccgtcacccttcccggtggcaagcaggaaaactacctgatcaccctgcgtgagtgtcgggcgaaacggtggcgcaactagacgtcggattgacctttaaccctggtcgtccgtgtgaattcgtagccaagttgcagatccagggattgatctggggttccccttacatcgaattggccgactcgaccgccatctcgagtgataccggttacgtcgccaccatcgactacaagggcaagggtgagtcgcgcatcgtcaactctccctttgggaacctgtctcgcacgtctgatttcgggctgacgacgttccattcacgctgcccgttgtgctgcaggttgggtctcgggcaaggctcactcgtacaaggccaccttgacccacaacggcaagtcggttcgaacttacgagggaacctggaccgggatcggcaaggttcacaagtcggaagaagtctttaccgactccaccgtccccaagaccgaggtctctgtcaagcctatcgaggagcagggcgagtgggagagcaggaggttgtggtccaaggtcgccaacgggatcaggactggcgattacgatgccgcttcgagggacaagagcaggatcgaggtgggtttcgatgtgcagtggaggttgcacctcggagatcattcgattgacattccgttctcgcccctccccccgacgtccacagaacgagcagaggcagatgcgaaaagacgaggccgccgccggatcttcttggcagctcaagtacttccagcacgtcgacagcgaccccgtctaccgaagcctcgccaagggtatcaagggcgtacccgaggaagaggacgcttacctgattgtcaggtcgtaagcggtgcacgaatgacgacgacgacgacgccgatgacgcgggacgtggtaggatagacggttgtttccctcgtgctttttgtccccccgtctcggcctcacagggaccgggcgaggggtctcttcttgtgttttgttcttctcctccccccccctcccccttcggggaacgctggaccctttgcccaaccctcggcgatctcggtcggacggagaattcagcacatcgagctcggcgaggtgatggttctagttttttttcctggctttcgagtgcgctcaaacgtgtatttttgataccatggagaagattgaattgattcgtgcattccgggagacgaggcgggatgaggaggattcacaagctcgaccaagtgaggtatatgcagcgcagcgatcagactggattctggcggcgatacggagatttcccgcatcgaactcgcatgtacgagtacgagccaagctgtgagcgtagtgagacggaagagtacaaacggtagcgtcgtattgcgctcaatccgctgggaaattggtgttcgaatggtggcaacttgaattggctgcgcgcaagggcaaggtcgaagcgacaagaccgcaagcgacgtctttgaaatgcacactgcgccatgttcgggtggtcttgacagccaacaagttcgatcctggtgaccatagaggctctacaacagaggcgatcgacggagattgcaaagagtcctgtgcctaacattggcgagtcctagaagaagcagggaaaacggtcgccaatcgcagtacccaaatgcacacgaaaagccgttcaaaactctctaggtataggtagccttcaagaccgttgcggctgatacaaaccgacaggccaggagatcataagcgctgacagtatcatggagttaccgcctgatacatcaacgtgaaatcaactctacgcaaagattgttgaccaatcagacgggatatgcccccaaggtctgctttttcttcacacgcttccgccacatctcatgctcgtcgagatcgggtcggcataattaaacaagactaagtctaatcaaggggattccgtctcgaccggataaagcacatttacgggcatgagccatacgatacaaattagtgattattgacatgaacacgttccgatcatctaaggtcacaatagttacatttcaacgctgcgaccaagagcgcgagatgccgagcagttcttgtgaaccctcggtaatgtacagctgctccgtcgctgatcgcgaagtccaggaaagctgttttctgaggataagtgcctggatatcgggcttgtcagcactcgttgactctcggtcgaatccgcgccacctagtctcactgacctgctgggcggaatatgtgcgctggtcccgctcgaacacctctttgacttcctcctcgcatccctcaccaagcacatctaaatcttcgagaatcgccgaatataaatgcgtcgtaaccctggcttctgtttctttccgtatagccgaaggtgtggcacgttgtaacgtgttgggaatcgagttcatggcattcgacaggttgaaagccagaatcttgctggtctccgagatgatgcgtcgcgcttgcgtccagttgttgcgagacaccagaagcaccgcgcgggtcattgactcgctcgcgagcagttccgccttgcgcctaaggatttcgggcgcagcaacttgttttgtcggctgtgaggcagacaacgtgatcatgagaagtcgtggatcactgagacgagcgatttgtctcctggccgaggggtccatgtactggcaatcgacagccaagagtgggacctcgtcaagggtaccctcttcccacagctggttgagattggaatctgctaaatgcggatcggcgttcgtaaagcttcccgtctttttgaccttgtgaaggctcgaaccggtggaatgggactgagagtgagcaggggaatgcgtctcctgatcggaaggctcgctattttcatctcggggtcccgaacgttctcgctccatgtcgaccaagatctcgattttggaaccggacacgaggtgcccgagttcaatctcgctagagcgtccatcactggagatcatcgtactttgtgctccctggatccgtcggattcgaaagtccgggaccgttgcggacaaagacagcttgacagaacccatgactatgctcataagcccgccaaggattccagcgcaaacgtctgtggaagaccgaggtaagcgcccgctactcatggcgattcagactcggtggtagacctgcctctgagttgattccaatcgtgagtcagagacacataagtcccgtgcgtagcgttggacagcaaccacaaagggcttggctcgtggctcttggtgaagcccacggcgtgtatcggtacgctgcaaagaacataatcaaaactaggccctcaggggacggtcgcaagtggtgactgacctggctgcctcgagtcgagcgatgacgagatccatgctgggtcggcttggaataccagatgtgtcgctgaccacaatcatgccgctaataggatttttggttttccgttgaagggtgttatcgagtgcagcgttcacggcgctgacaatgtcgatctgttcgtctttcggtccaacgacggcgtactcgtcgtatgacgaaccctcgctgtctaccatgctcaatgcaaacctttccaggcatctccggctctcgtatcgagtcgcattgaggaaaggcgtccgtttgacccagccttcgtatccagcttgataggcgacaaggcagactctatcgtgattgcccaaagcggcaatgacaaaattgagagtcgaggtcacgaggtctagcttgagagccatcgaagcagatgcaggggtacgcattgcagatactggtaccacaagcacaaggtcgataggagtatggaccggtgccaaaggctttggtaccgagacgtcactcgcggtctgcagtgatgacaccgatgacatgttttcctttctgaattgggtggccgaaacgatctgttcctgtattcccattcgagctagtttgctcgacgatgcggtcgtgggaggcgaggcaggagtcgtcgggactgcagaagtagctccattcgattctgctagagccaagttcaaggtgttcatccatagggactgtgccgatttgtctcgaaagacaatgatgaagctttcgatgttggcggccttcatttggactgtaacgctcagctctcctgcaagcgaggaatcgacaatgcgcgagacgtccctaaagtagattcgtcccttcagcttgagaggtgtcttggccttttttgtgtttctgtcatctcctcctctgagactgctactgctagcgctcgaagtgagcagggactttaagcctcgctttttctcttcggcgacacagacgatcgccatgtcgtacaggaacaccatcatatccaggacgaactgtcccttgcgtacctgcaggatatcaaataggcgaatacgccccagcgtttccagtccactgctcttgaagtcagccagacggtgcgtgaggtcggccgcaacatgtgcaaaggggtctggccccagcgatcgcgcggaagtgggcggaatgctgctgtcaggtgtcgcaggtgctgcactcgaggagccgcccagagtacgagcccttggcataccgagtcgagtgtcgaaggatgctggggacccggtatctctgctcttgagtggatagaagggtctgcgtcctgaaggcgacacctgcaccgtgatcatgcaagtcaatcctctcttggcgttgtcgacctttctcgagatgatgctgtgctccgctttgaccgtgatagtcggaactgcgacttgcggtaccatggatccgctgaagctagccttgcttggaacatccaatgcatcgtcggcatcttggtcttccttgtcaacagaggatgcaaaggaggacatggaagctgtgtcccccataagacttctcgtcgccttgctgaagtcgtttggaatctgtccacgagccccgatcgacctgttgacgcctctcttcgaacgcgtcgtcccgcttccctccaaacccatcatggcggcgaatttcacattgccaccccccttgtttccatttccctgaaacatttcgtcctcgtccaagcgcatgggctggcggcacacgccacacacgcccagatcccggcgggacagcgctagtttgacgggaccatacaccgcggtgaaacatgcctgcgaaagggtagaaacgggacccgcaccgagtcagctggttttcccgtgcaagccgagcaagactgctttgcactcacgtgatgtagactatgcccacaggcagaggtcacatttggcctctctcctaccaaccggtacaaagggttgaggctttcgcaacagatcacgcacacttcgtcgttgagcttttccatgtcctcctgcgcgaccagagtgacctggggcagactgatggaatgagtcattccgcgtgctgaaccgagagttcctggactgttcatcccggtgtgatggttgtaaatttcgaagcttcccgaattagcgatattgggtgaatttcgagaggcgaaaggatgcaaagaaccggtgtccgaatgagttccagagagggaactcctgcgcgatgatgggttgtatgacaagtgcgcttgtctgatcgtagtgttgttactggggactgttagggagtgaaccgacttggatgcggtagtcgaaatagagcctgacctctccagccgtcttttatccgcgaagttcgtactgatcggctcttccaatgcaaagcgcttgtcgaaggaatcccaaccttggtgattcttgcgaccgtaaacgtcggcagcgctcgaggtggcaaagatcgaatcaacgtcagtatctgtgccgctagctgttgttcctctacgtgaagaagaaaacgccttggtgttgggcgatggatccgccttgatatcctcctcttgcttctcattcagcttggtggtgcgagggtggttctccttgtcaaactccttttcaaggaccgaagtcacgtcgaaaaacaacgggctgccaccgtctggtgttatggggaaacggtaagacttggtcgtggagccttcgaccgcagccaggatatcgacgtggggggaatcaagtccctttgaccccatgtctaggtcctttccattggaatggagcggcgacgaggactcgatctgtctgtgcaaggcattccctccagccgcaccgatcttgtcatctagaggcctttgaagagggatctctcgcaaaggattcagatacagccctccttcctcgtccctttcgtcttcctggcctcggataaatgccttgatctgcacaggttctggtcccgaatacctgtcttcagtgtgatgagagtggataatcaacttgcttttagatccaaaggtcccggatccgctggaactcgaagtcataggaggtgcatcggtcgaggtggaggtgctctgtgagaattccgtctgggacagggccaacgaagggatcgagtaggacgtgtcgactgagcgagtcgagtggatggaatgcgccgatgaccgaatggggatttgtcggagagaaagctgaggtggcgaagagaattggatgttggtcagagacgattcctcgggtaccctgggtagctgcggaggtgctaggtgcctgaatgatcccgagtaggccgaagtcctaggcgatttcctggtggatagttcctttgacgtctcgtctggaacctggagactagtctccacctcgaggtagcctgccatactctcgggcaaccaatggagaatcctttgacggatctgttgacgagtatgatcggtaaacgccgtctccaggtctggtaaagatctggtcctcaataaaagggggtttgtcgatataaagtcgttggatctaggttgatcgacgtcgaagtttggtggggtgatcacgatccttccgagtgaacctagtttattaccagtcgtggtagtcgtcgtgatcgctgtggttggatcccacgagacgacccttcgtggatctttatgtgaatcaggcgatgcgatgttgatgcctgtttgaccggtttgttgatgtgatggcggcgagaacgggataatcggaaatgagagccagatgatgtgatgtcagtctcaaagcacagccaagcaggacgggaaacagtcacgaggtgcacgccgtgtcgccgccctgccaccctgataaggtttcatgatcgtcgggaaagcgatcgagagttcgccgaggcagcacgaggggggggggaatacggggtaaaggaggggtaacaaggttctttttgatgatcaaacaaaaacaacgtgggactcacagcagtttctttgccaactcgtgatcgagtcgagccgatcatgatccaaccccttgcacccagcgagacagcccgtctcgacacttagcccgtcctcttctacttcctcgcccacttcacaaggtatcaaggggaaaccactagccattctctcgaggtccacgatagctgtaggagtttggggatcatacatcgagatccagtccgaaaatcctccaccggtactggctcgtctcggtcgaagcgtcgcggctaagctagcagggcgactcctatacctaggcaccgggcgacagacgcccctgaggtcctttgacgatgagcagtccaaagattgatgcagcagaaattcacctcgatctcctccttgcgtggtcgtttcacccggtgtcatctgcaagatgatcgacatggaatctgaagaggatgatgacgttcttgaacacgatgatgatggtgatgatgcccgggctcccgtctgatcccttgaaacgcgcggccgaagatcaaacgtcggaagcgtcgggctgatcccatcatcgtccgccatattcagctctagccaagggtggcaacgggtcagtatagtcactcaacctcgaatctatcccggcctctgaagcctacctgccaatatgccagccgcatcgtctgttgacatcctgatccccgcccgctggatcccgctgcccccgctctccgagctcgggctgatccggccaaccccgtgcaagtagtcgtcttcgtcatcaaagagatccagctcgagcgggattcctgaaggataccctttcgactcggatcgagaagaaattgcggtcgttgtggcagaaaagggtgatcgagtggagaacttggaagagctcgaagtcggaggaacggtgaaaaggtcggcaaagtccgcgagctcatcgaaatcgctcatctcgaggacctgtacgctcgaatcgcgggaatgcatggtgacaacgttcttgctattgtggtggaaacgaggtcgtgcaagtgttcgagcagattgatcttgcccccaatatcgacagggaagacagacgctcaagcagtgttgccaaacgctttgatcatagtgacaaccaatcctcacggctcatgaacaaaaaaccgcccaagcctgtgccactggtcgcaaactcaagcgatagcttatccactatcggaatcgtatgcatgcggtttgtgtcttgcacccactcgatcggactcatcgatccatgtctcgcttccgaccagtcttgttcacggagaggacaaagagagtgacacagtatgtaacccgagtcagacatgagccagcacccgggccgtgctggttcgtctgcgtggtgttagcgatgattgctgaagtgcttggcatggcagggcgaggacggcccgggcgatccatcgaatgcccaggtgggcacctggcgacgaggtgttggctccattcggaaagtttggcgggaaaggcgcgactgatgaagacaagggttcgagatatgcttttcaatctatctcagactgccgcagagccgtccgtccactacacacggaatgtgggtagtgggtggtgggcacgacgactcgtcagccggcccgaggagttttcatctcgatcgcgaggcaagcctctcaaacgtatgttcctggtttgaggcagctcggttcggcaagaccttctagataaaatgatgaggatcatccactacaagccattcgaggcaattcgtctcgccgccttggctgcatctggattgctgtaccgggcggacaaaagagacgatgattcggactaactggcaatcgccgaacttttccttcaacgcgtggtcatggaatctcctttgttcgcttcaacgagtacacacgctgttaccccgggcgtcatttttgaacaacaatcagaatcttcgataagtagtcgtcatcgttatcgtcatgatcgtggctttgaaccaggagaaacaagacaatagacaggcgctggagaagagttcgttagggtaacagagaaaagaggtaggaggcgcaaagtccgaaaatgatccggcggggggttaggtggaaaccacgtaagattcgtagccggaggacaagcggctaccggcgaaaaagacgtcttgacccagtccagcccggtctgacgatgacgaatcgtcaaagaaacatgctagcatgtcgaggtatatggggaaagggaacggtctgtggcctttctcgagtcgaacggggtgccttacttcctggcctgctctcgagccgctttgatcaacggggccagcgtcttgagcggttcagccgatttgaagaaagtgtgctgtgtattgcgaaagtttcagtcagtatggcgaatgacgaaaactgtgctcttgcgcggccaggactcacctggagcaatctagctgcatcaggtcgcttgtccgcattaacctccagacatcgcgcgaggtagtcacggaaaacgggagatagcgactcttggttgtttattttcggtgtcccgttggtagcaatcaggtatagagctcggagagggttctcgttcaagtagggaggctctccctcgatcatttctgcagacgtgtatgtatcccaattagagaccatgtgcggtcggtcatcgcgccaggcgaaatgacttaccgatcgccatgattcctaaactccagacgtcgaccttaggaccgtactctttccgtgtcacgacttcgggtgccatccagtagggagttcccaccatcgtcgtacgcttagcattagccgggtcggaaatttgagcgcagaacccaaagtcggctgtgacgggaaagagtattagcctcctccccttgatcgcccacacgtgtgactactcactaagcttgatgtcaccggtcatgctgagcaagatgttatcgctcttgatatctcggtggataacgccgtgcgagtgcaagtgccggagaccctctgccgtctctcggcttacggcagcaatctgaccctcggtcatgatgttgcaggtcaccacatcggtaagactaccgccctccatgtactccatgacgacccaaagatctcccttgtagaggaaagaatcgatgtagttgacaatgttgggatggcgagacgacttcatgaccagaatctcgttgatgatgaggtcttgcttcggttgcttttcaaggttcatctgcttgatggccaccgagacattggtcccgagctggtaagcggtgtagacaccccccgaagcactgtcggcggactggatcgtcagaaatgcacgtcgcagaagcagccttagtagactacttacccttgtccaatcttgacgagacttctgtacagtttcgtagggtccgcgtcggtgcagattgccttgagacgcgcgacaacatcgaagttctccttaggtttctcccttcgcctgggcgttgccgcaccgctaccaggagcggccttgctagcttgacgtgacaaggcagcagtagccgcactgccgctttgacctcctggagctcgtgacggatgcgatgactgcatggcgaccttttgactcgactgaacgggtggaggcggttgttggcgcgggtccggatgtcgatgcgacatggatcgatcgagcgctttcgggatgacctgggtcggaggcgcccgttgcgacattgatcggtcgagagcaggggggacagatgcagcggtaggtacattctgcattcttgatggcttgggcggacccggtggcggaggagcacttcgaacatcactctacgaaagatgcaaccgatcgggtcagtccgagcgtgttgagacaaaatgagcaacgggcactgactggtgcgggagcttttggcatgccagcctttttgcttgtcggaggtggtggtgggggagccgtccgctgtcgcaacatatcagtaaggctcacgagactcaagggtattacgggctgaactcacgggatgagcgtattttgccatgaatgaattctcggatccatgggctttcgcgatttctgccgcttgcgacaaggaaaccggttgaccggcctcgccgtcagcctctccgctactccggttcgacccagcggcattcttcatcttgtcgaagacgccctcctgtatactgtgcccgttcgccatgttgtccccgtagaacttcatgatatcgagaacctgaagatggtcgagatcggtcagtcggatatcccaccataggcaagcttggtacccatgcgttacgcaccgcctgaggattcttttcctgttcttcccgcgtgacaccgttggcttgcaatgtctgctgccattccttgggcaagcccgtgactgtacaaaggcccgcgtccgatcagctcatgcacggttcgtcattttcaccgctactgggctcacattctccggtgtccgaattgaaaccgacatgcgtcagatgtaccgggtcgtacggtgccgagatgacgaccgcctgcttggtgttcaagagatctagcagacaagtcaatagcgtcagtagagctccgaatcgcacgagccgatatggcctacgagacctacccgtcatgaatccaaagacacccttctttccctctttcgtgctggatttcgtcccgctcctctcccttcccttggacttttcgttcccatccttgtcttccgccccggctcccgccttttcgacctctccatcgaggcctaccatggcataggggttgcctggagctgagaacggctggtgatgcaagggaggaggttgcagaggcatcggcgtcatgggcgtatgcggcccgttgccgttgccattgttcaaaaccgacgttgatgccggagcccgactatagtttgggggcacaggaggcatgggcgatgggatcgagttgctcgagttcatcatgtgcggcgaagagaggtaaggcgagtgcgagctcgtgggccgaccggtggaagccgagggagttgttatcccatgaggtcctccaggtccgactgcagtgttgatcgcggtcaacccggtgtgagcgtctagcaggggcatggttcccgctcgggaaggtcgagggggcgctccactgggtccactcgcagaccctcgtgcgctcatcgagccggtcggatagtccccctgctgcccggccttttcgaaactctgggagaacctgttgggattgggcgaattgctggccgacttgttgcccctcgtcgacgctcctcctggcgagacttgtccaacaccgccatccctctcccaactcccttgtacggacaatcccccgggggtcatcccaccaccaggtgtaggcggttgaggcgccgtccgggtcggcatgggcaagtcccaaggcttttccaagggtgaatcatacttcgatcccgaccctccgtaataagcagcgtttgatccagtcagatcactgatgggtgacatcaacttgcttccccctgacgacgacggtccaggtccgccggcgtttgaatgtggacccgaggtcgaggtcatacccatggacatgtcctgaccgggtggaatgtgagccgagtttcgcgaaggccgagtatactcgatcgtccgagagatcccggtactgccgttcgggttggctgagcgagagttgccagacatgtcgggggaagatggtgaaaggggttgagcgccggtgtctaggtcgggcggcagttgaagatgagaagaggagcatcgtcagaggtgtccaggtcagccgacttacctcttacattcactcgggatcgaatcttggctacttacagctagcctgaggatgtctgatcttcctgctaggacttcccggttttccggtcatgacaaggttggaaaggaagaatcaaggaggggtgctttcctcttgatgagatttctcgcctgtcttgcgtcgtgatctttcgagggcaaacgtatgatggctcgggctgggtctttgttcgtgttgagggtcgataatgcccaagcggtgaattggcttaagagaggggacgactagcgacgaatgtgtaggcgtatgtatgtgtgtatgtacgtatgtggcgttcagatggtgatgatcccgtggtaggtagcacaagctgaagggggagatgaggtcaaaggacggtgaagcgtggggtggattgcctgttgtagcttgatgatgattgttgttgtgtcaagtagagtagtctgtttgttgatgaagaagccgatgtcgaggccggcctgtcgctgtcgactcctctgctggcagaacgtgtaatatctgagcaactgtagaggagactatgaatgcctatgagagaggctatagctatagcgatggttctggtggtcccggatgtgaagtgtcaaagcaggacgatacgatatacgatacggcttttgcactttgatggtttcgaacgagcgagccaggggggaatgcacgaatttgatgatgcgcgagcttcctctgggcgtttgttgtcgttgttgggcggcttgcacggatactcctcttgtgaaacgaccgaggggcgttgcagcccagataaatcgcagagtgtgttaaccgtgtcttcctataacgaggacatatcgtgcaacaagagcgctatgcgtatacaaggtgtaaagtgtaaccaggtccaagtttgaccggttctcagcgagatcgactgaaagaagaatagcgcccaagttgccaagatcagtcctgagactcaacgtaaacgcgtgtcggggtggacatcggtaacaactgggccatcatggtcgacatcaacccttctatctgcctttgccattaggtctggcacctctacacagctgtagattgcaaggtcaagcagcgggtgactgagttgtccggctaatcatacgatacactcacaacaatcccgatagaacaatccaacgcttcacccccgcgcccgtcccgcgcaactggtggcgcccttccggagaaagttggcccaaagcggcaagtttggaaacattcggaaaggcaccgttgggttaccccacccgtcgttcggaaccgctaatgcgtcgataacctccgccgacgaccggttgtcgcacatcatcaacgtagttgtcatcctccgtcgcgcagacaacgcaggtcggtcgggtctatctgaagtccacctctgcctcactgagcgtctgtgtatcgatattcgcaacctggacgaccgttgatcgtcgaaccttggccacatcggtgattcgtgcgttcccgcctcggaccccaatgcgggcttccacgacttctcccgtctctgtttttacctaccgtccgatcgaatacccccgagctcgtatttcgcggcgacgtggcaggtagatagagtttcatggcttcgtcagagttgcaatggcatggatcgagtctggttgttgacccttagtccagaaagagaggcgtaggactgagacttcgctttagcccggcaaggttcctataccactttcagctgcccctcgatgtacatcacttgtgaagcttatgtctgcgtttgccccgtcgtctccgggctcgtgatcattgtggacatcgatcgcatactcgggaacaagaaacgccccatcaaaccccttgttcaccgcagcaaaatcttgcggacgcctctggcagggcgactgagatgaaatgtttctccggccaagtccagaggctggtgcagctgatgaagtaacttctcacacaagggcaatgttcgtgaagtctacgccaacgaacgaatacaggactccgacaacgccatgtttcgtcgaccgcttggcatcactacgctagacaggacgccgactgaatggtggctttcggcatcgagcgtacttgtttcacagtcgctcgaaccatatcatcgtcgacccgcaggcatctccattgttcccacattcctagttgtgatgccaatctgaagcagatctggcgagcctataccttgagctccgacttacagatccgcgcatctgacggacaagaccagagggccaacatcgcgatgtaacgcacgagctggccagtagggagataccttgacatattcctggacgtctttgcgctggctttggcgatcgcgatctaagcgtgaaagaacatgccttttcaggtgtatccacttgttgcacctggcgattctgcaggctaatctgaatctttccctgatacctgcgcacaggtgccctttcctgacactcgaacatgctaatctaccttcctgcgtcatggaagtcgtgatgtacgcgtcgcaagggaagtggcgaaagaggcggaagcgaaggcagacatgtacaagaaaagacctagaggtgatgatgataaggaggcccgtctctgcgtacggtctcagtagtcgtcttggtcgctcaacacaggcgttgtgatactgcagcgcggcctgatcacatggcccatgtacaccagcgtcgatcgtcccaggtcgaacctcggccacagagcaagacgatagaattgaaccggtaacttggctgtcgtcctcgttcattccgacgacacgcgactacacagacactcgtctacatgtttggcaaatgggagccgacaccgcgtctttgccgatccttgaaatcggcgcacaggagtgaggggatgttcggagaaaatgtcaagttgattggtatgataatacacgtgtttccccacattacggtttccatgccgagttcgaattggtcaatggaatgtgttgtcagggaggggttcgaaagcccccctctgatcaaaaatgaatgctgtaggtcgaatccgtcctcgactccgatcctcgatcgcccgctttcctaagcgcgtcaccggacggctagtacctagcccgcttgggatccctatcctcgtaaccacctccagctccggaactcccaccgtagccgccgccaccgctgccgtattcccgcttgacgcctgatgctgcgccggcatctggtgctccgccgtagttcataccgcctccggactggaaaccgcctcgactgcaaataaggaaaaggtaagagtgtcagttgtgcaccctggcgagggatccctggcgtaaagacgtcgagctcaccctccgtatccacctccagggggaccaccgtacccgccccgatcgccgccgccaaagcctccacggtcacccccaccgccgaatccgcctcgatcacctccgaatccacctcggtcgccgcctccgaaaccaccgcgactggaaaagacacacgaggacgtttcaaaaggctaagtcagcagcatgtcgcgagggatgacaagcggaggatcctgcgtgtgacactcaccctccgtaaccaccaccgggaggtccgccttggaatccgcctcgaccacctccaaatccacctcggtcacccccaccgaaccctccgcgctggaacccgccacggaatccacctcgtccctgttccaagccgaaagtcaagacgagagacacacgcaagatcagcctcgtcgtcccggcgtatgagacggccacaaagcaaagcacagcgccgacgctcaccccgcggaaaccacctcgatctcctcctccacgcatccctcctcggaacccgccaaagacgggggccatgggcggtgccacggcgaccggatccacgggcttgggtcgacctccgagcccgcccccgagtttatggggtttccagcccttgacggtccggccccgttcgacgtcgacgaggatctttttatgatggatagggatcccctcggcgtccttgtaggcggctagcagcgaggacgagggtcaattaggtgtcatctcgcttgacaaggagcagggtcaggccagagacgaggtttgtttggcaactcacctttcatatccctctcccgatcaaatacgatgaacgcataactcttgctctttccctttttatccttgacgatcctgatccgctcgatcgcgccgtacatttcgaattcccttcggagatcttcctcggtgacttttttcgactagcagtgacgaggcaggacgccaaagatgagcgattcgcaaggcgacaggattggattggaagcgcaacgtacgagtttcgagatgaagagagtcttgtagggatcgccttcagctttggggtcttcctgcgggttgtctaccagccaaaacgaccgatgtcagctcaggtcgtccacccctgcgatgaccacgacgacgacgggagggggattcatcgacttgcaattcttctcgaggttcttcttgtactcttccttctgcttcttcttttcctcgcgcttcaattgtcgctggtactctctggccaacgtgaatcccttttccttgccctcggcctcgctcccctgaccggtcttttcctcgctcaacatcttctcctcgttctcggcgtgtagccgtttgagcacgtctgccacaccatcgagcttgtttggacctggttcatgagggtcccgaccgaggggtttgataaaaggaggtgggggtcgaggagcgaatagtttgagcaagttgggtgggaacttgcccgggatggtgccctgcatggtggtcggcgggtggttggaggatgggtgttaaaggtgtgagtgaggggaagatgggccgaagctagacttgttcgtcagcgggcagagtgacgatggtggtggtggttgtggttatggtaggtggtgtatgtacgaacctgacctgacctgaccctgacctgatgatagtttcgctcgctgggttgaccaggctctcctgtctctggctctgtgtgtcgcgtttgaatcgaatggattcgatgatgatccgcggatttcaaacaagaaactcaaagttcagagccctcagcgtgcagcgtgcagcgtgctaagggccagccagcatctgatatcatcatcatcatcatcatcgatcacctacctctacggggtactactacctaactactcttgaccacattcaattcaccctcgaacctcgtcatagacattcgaacaaacaccatcattacacacacactatccactccccgctgacccttccgatcgtcctcgaatccaccagtcgtttacaacaaacgggacagacacatccatcatgtccggtcaaggcccaagagaatccgtcttgtaagccttcacgacccgcccgacccatctcctgctctaccagcgtccaacctctctgcacgtattcacgtatcaaacgtctgacccatgcaaaactcgttgtcgtcgacagtccgacccgtatgaacctgaccctgacgaaacaacgattaaagggagctcagacgggtcactcgttgttggcaaagaaacgtgatgcgttgatgacccgattccgagccatccttcggaaagtggacgaggtcagtcttccccgccgctccggatcggttgtcgtctgaccccatccccccaccctgaacctgaacctacacctgctcgtcacgcaggccaaacgactcatgggccgggtgctccaactcgcttccttttcgctggccgaggtgacctataccaccggggatatcgggtatcaagtccaagagtcggtcaggcaggcgagttacaccgtcagggccaagcaggagaacgtctctggggtcgtcttgcccgcgttcgagggcgtgaggagcaaggaggggaacggtcagtactcgacgtgagcgaggtcatgagcggggggggggactgatggacaggttcccgtgtcggtacgacatagacttcaacctgaccggtctgagtcgaggtggacagcaaattcagaaatcgagagagacgtacgtcaaggcggtcgggacgttggtcgaattggccagtttgcaggtgcgtggcacatactaccatgcctttgagccgtgatcgatcgattgacgacgacgacaacgacaaacccgtctcctcttgacacggcggtatcagacggcgtttacgatcctggacgaggtcatcaaggcgacgaaccgacgggtcaacgcgatcgaacacgtcgtcatccccaggttggagaacaccgtatcgtacatcaactcggagctggacgagatggataggcgagtcccgacgtcgtcatcgacctgcactaccgcgctcgagctgatcccatgaccctcatcgcgacgcttcgatctcagggaggaattcttccgtctgaaaaagattcagggaaagaagaagcgggacacggaagccgccgaggcagagatggcggcggagaaacgggacgacgtcgagtacagcgcggatagcgggatcgggggtggagaggcaggtgggaaagatatgctggatcagggcaaggatgaggacgtcatcttttgatctgcgaggtggctttctgtttggggggccgggcgaccatttagattcccggaggatgagggggaggggcatcttggatctttgtttttgtatcaatgggacgtgggtgtcctggccatatatccgttctgcttacaatgggccaggagctggtctgatgcgggggttctgctttgcgatactgtacaatacaggaggagaggagggggggagcttgggcaagcggtggcatttataacggcacaagagccgtagcaccccttacgacaattaaggaggaagggaagggaccagcattgattagggtgttgaaaatgacaaggatcgttgatcgaagaagtacgaggtttcgagcgaggtacgtatggccgctggttaaacggcaatcagtttgtacaaccatggttccgccagtcgtcaacgagcgatcttgacagggcggcccttcaccagctagtgtcagggtcgacttcccgttgacagcgtgcgtctagctgttttcctgtccctagcctgaggcctaaaaattgagattataaatctttgacaccctgagctttcatcaagcactgtgtcgtataaaggctagtacaccagattctgatggttcaaatctaacgttctggtgatctgggttcgattcccagcacggtgttgatgttttttgaccttttttttatgcgcgctgtagcgcttcgcgcttgcggcgagagccaagccgcctttcggacctcgacattcctagcgcaccgaccagcccatacgtcaagattgattgggaaaggttgatggtgaagccgcaatggacctgcgggaacctggcactagcttcgacccagtacggcgtatgcgacagtcgacgactggttcctccaggcttaaatcatcaaaagtggcgcgaaagcatggctacgttcagcgtgcacgactccaacatataaatgcaataaatacatgacgtgattatgcttttcctgacaaacaaacatataccggcggtggagctgttcacttgaagtcagattcttcgatgagctaccgttaaaccgatcgttaagacgagctgacacgcttcccgctgcccgcctcacgccttgttggaagcgatggtagatggatctggaacccaaatcggcacgtcaccagcccgccctgtctaccatggtgagacactctagctgctacagtaaaactacggccgacaggaacgggtgtcggttgacgagtgagagagcacgcatcaaatgtgcggggtactgatcgaccgtttcttttccgactcggtcaaacatcgatgcgcttcgtcgataatccttggcgtttcgtgatcatatgggaagaaagagggtcacgtcatgcagagaacacgatgtatggtatgtgaccggttccaacactcgttttgcgatttcgaccaatcgttcccggaaggtcgatagtagtattttcttgcacgcatacgagaatcagatgcaaccgttgtttctacaaagtcccctcttcaccggcacgagtagccttgctccaaacctctatggtagatacagtccattacgatacatcgtctgccaagtgcactcgtctagcattcatccttatcctctgccctgtattcgtcggcctctttatatgtgatgccgtaccgcttgtttgccgactgtcgccacttgtcaccataccggagcgtcaacacgatggacgcggctccgatgtatccaattatggcagctatcgtattcgtccatccggtaccgatcgcgttgatacatggcaaggctcccgcggaagccccggccgcaaatgtgtagcgaacgaagttgttgattgcgatctgacggccgtcacttttagtcacctgtcaaggactcgagttgttatgcctgacttacagcttccgcactcctcgtctggctcgcatcgactagatatacgttgagcggagtcaagacttgcatcagtcccaccccgttgaagaacaggaatactagaggcggtcccataccgccggcgctgcaagcaatgcaattcagtacggttactaattttcactaaggacagtagacataccccgtctgaatcaaccaaccggctatcagcaagctggagggcatgacgaacagggcgccgatcaaggtcgaatacagccggtcttccggccgacggaatcctcgcttttcgagccacttccggacggtccagtcggcgtgaatcccgccgacgcgcgcaccaacgagattgcccataccaggcgccaggtatagagctcccaagatggcggcgttgtcgagatgataccgtgacttctacttgcgaggaagatattttcgcatgagcgctcgcgggagcttggcttgtaggaagaggctgcgactcacaaaaatcgtacctatccgaagcgaacagagagtaggtcaatcagtattcagacactgaaaaccgatttgaagcgaggaccagactcactgagtggtacattcacagcatatgtacagatcatgacggcggacgaactgaacgactgtccgatgtcgctctgagcacctctgtctccatatccgaacggtcgaaaagacttacactagatgccacgtttggccatctcagtaacgccacactgctcagcgggttgaacttgtgaatgatgaacttcttgcccctctccctgcactctttggcgtgtggggtctctccgtgccacgtctcgggcaggaaaaagtagatgaggacaaaggcgaccgcgccgaagcctgtcaggcagtattgcatcgagcgccatgtttgctgccaacgagggagtgtcagtcggacgagcgctcgcgatcagtaacggggagttattgaactcacagcggtgtactcctggaataccccggcgataatgggcgacaatgctggacctgtgtcaatcccgacatacaatatgagcttaggattcgctagtcgatgccatctcacaagtgatactcataagacggcaccagcataaaatcctgacattgctcgtgccctctcgataggtctagatcgtaaccgggtaatgttagctcatgggaatgatggggtacgacccgtcggttcccctcaccgatatacatctcctatactgccagaaccgaccgccaatacggccgacgcgcctgtatcggtgcgaccgctcggtcagcttcattgaaggctcttgaatgcttctgatcaccagcgactcgcctatcgcctgcaatatcctcgtccctatcagggcgcccacggtgttgcacctagcgacccccacactgctcgcgacgtagatcgggatgctccacaggtagatgactctccgaccgtaaaatccgctcaaggtggaccacacgagaggagcggcaccgatagtgaagatgaagattccgacggtatatccgatcgtctctggggtggtcgatagatccgaagcgatctgaggtatggatggcataaagcatgacgaagtcacggctaacaggaaggtcgttcaagatcgagtaagcgtcttggcagggctagggtgaggcagtaccgactcacgaccaaggaaggccgcatacgaaacgatgaacaagatcaacaactttttactcttggggaacctgtcataaacgtccggttgcttgtcctccccttcgcctgagtttcgatcccgctcggcctcgatctcctgcatcgccttttcctggtcggcagctccttccacaccatgagagatgagcttgaccagaggcagcgcattggaaagtgttggactggtaggagacagttccgggtcatcccgcttgtataaccgcggttgagtcatggtcgtcttcgagagctcctcgagtcagcgtcgaggttcgcttggccaagttcgtacgatgggatagtcacggcgcttcactttccttgaatgttgagttgtcttgagagtgagctgcaacagtcggtgccaccttgcacaactcaatgggctacaggccgaagaacgaggtctcgttgattatacagtttcagatgtgcttttcccggcaaaaactcggggacaaacccaggtttcggcggttggcttgaagcaacattgcacggtcaacgaattcaacgaatgattctatatatccaagcctgaagtgggtattgctttatgtcatgatcatcaatgggtttccgagtgatcgagtgattaataatctataatctatgatcgaaatagacatgtgcttcatcggtatgacttgacgcatggacccggcaagatcctgatggctaccctttccctctgcgcgattgtcggatttgaccgagccgatatggatcgtgaaggatgccgagaaacggcatattcatttattgataagcgatgcgatgcaatcggtgagatgaagacggacatcgagtccaggtcaaatgtccgttttcttcagttgtttcgcgtacaaatcacgtgatgggcaaccaaaattggtcgataccctacttagaccctcccctagccatccttgctcgcctgtaattataacacaccatctcaccgacctttctcgtcagatcttcacatccctcgactctcaaacccccgactcgatcgatttcgtgatccttgctacgggccatcgaaaagacaccttcactttgtgagtaattcttgcttggtatctccacctaatccaagtccctcggcccttcctacctctagtgatgaacacatgccaagacaatttgcacgtcagtatgaggattcattaatctaccgtacgggtcgtcctggatttcatgcctttcctaagggaggcttgacgttcaggcgatctaggtagaggatccaaggcgtaaaacactcgcgcattttctgaaatcgaccacacctccgcccgctctctgtctgtcgaatcgcttgttcataagatcgatcgcttatactcaaacctcgtctcgcctcacctcggatttagccattttagcaaaacaaatcgtcgaatccctttcaagatgcctcccgacaaacgaattctcaacgccatgaagcggtccgaggtgcaccgaaaggagaagcgggcaaaggcccaggcaaagttgaagcggagaatggaggtgagtctttcgggatccctcttcgtctccttgtatatagatgaagcctccccccgttctgttatatatacaccgtccactccccctccctactcctctttcgctcctctcttcggtctcttccgcgtcatcgttgtcatgtctagattatttactatgaaattgtcttgcatttctctctctctcttcctcgcgcccgcatacatgtgaatcgtatctcctcgactgtctcgtctactatttcctcaaacggcatcgacctggcggatatgacaccccatcgaacgacctatgcctaatgtcagaccaggaaaaacgagagggaagacccggagggggacaaggctcgggaggctcgtctcgccaagaacgtccccaggactctggacaatagtcgtcagttcgacgctgggtcgtatttgacggcggatcccacgagcgctgcatcgctagcggccaggtccagattgatgggcaagaagaagaaggtcgagctgcccgctcagagtgaaggtagcgagagcgaagaggacgagaacaagaatggggcgggtcccgggccatcttcctcggccaagatgaagaaacgtcagactgacgaggacgaggacatggatgacaacgacggccaggacgatgctgccgagggtggcgaggaagagcaggacgaagaggccgaagacgagacggcgacgaagccttcccccttcccgaccggagtcttttccgatgaacctcctcgaatcctcttgaccacctcgcctcacgccactcaagcgactcacgcgttcatggcagagttgcggtccgtcttgccgggtggagaagtgtacaagcgattaaagggaagagggttcgaggtcggtaggatcgctcgatgggccgccaagagggaattcaaggccatggtcattgtcaacgaagaccacaagacgccgagtaagtgatagagcgctggcgcgtaggtccccatggtggcaatgctttgctgactataccgatgcgctaccagatgccattaccgtcatcaacctccccgcgggccccacggcctacttcaagttgaccagcgtcgtcctcggtcaacagatcagcggtcacgcccgcccatcgcctcattcccccgagctcatcctgaacaacttttccacattgctcggaatgaacgtcggaaggctgttcggatccctcttcccacccatgccccaattcaggggtcgacaggtggtcacgctgcacaaccagcgtgatttcttgttcttccgtcgacaccggtgagcatcaggttgacgatttgtctcgtaatgtcgcaccgcagctgactcgttcgctcaattccctgccgactcgcagatacatgttcgcctcgacggaaaaggctaggttgcaagagatcggtccgcggttcacgctcaagctcagatggttgcgaaagggattgccgagcgtactggctgctgatggagtcgcgcctcgaagcggagacaaggccgagtcggaggacgacgaggatgcagaagaaaacggcgaagatgtagatgtcgacatggagaggaccgacaagccaacagtcgccgacgagggcgaagacgaagacgaggatgaagacgaagcggaagaaaccaaggggaaaaagcgaaaggatatggtcaacggtgtcaagattcctgcacttgacgaggaacaggaatacgagtggaaatggaaggtgagtcgactacccgctgcaatatgggacttgcttatgctaactctggcccatttctctttcgtccctagcccaagatggaggtttccaggacgacctttttcatgtgattccttatgggcgattacattgtgctctccagtctggcatattgtccttcatatctctcttcacgacaatgctgcatgtccgatctcccggttgtaaccgatccagttgtaccaagagactttcccaatccattccatctccaagtcacacctagctggttgcagctgactacttgctgcttcagctgcttgaccctgctttcatgtgacgcgagacgcgctcagccccgagttcgggcatccggtgagcctctatagagctatagatgtacagttggaactggtcaatctggccctgtaccgttcacgtctatagctccggatcaaaggtaacgccagactctttaccatgagcgaggacgagaagacagacctgtccaacattgccgctgacgaggcttctctgcccaaggctgaagcttcgacctcgtcgaaaccaacttttaccgtcgctgatgtcttcggaggagatgatagcgactcggacttgtcgtctgatgaggacgatgacgacaagccaggtcagtgaaacacatacatcttctcgaggttggaaaggggatgctgatggcgcatgattgatcagctgccagacaaccggttcgacgacagtcgctaagccctgctgctggacgagactccagtgattcggaagatgacgatgacgaggaagctggtggagactatcgacccgatggaaagccatcggggaagaagcgaagctacaacgcgatcgaagacgacgaggatgacgaggaagacaagtttcggctagaggacgcagacgctgccaaaccacctaaacgaaagcccaagggtgagcgcaagaagagggcgaagaaggaggatcgagaagagtctcgcaggaggacggacggttcgggaggagaggaaggagactttgagcaagaggtagatgagcagactcgccgtagacgagctctcgatgccaagctcgatgcaatcggcaagaccgggggaaagagacgacctaaaaagcgaggggaagatgtaagtacatgccgaggcccgacgatcacaaccgacacgatctggcccctgacgaaatccacctgctcttccttcccagggcgacgacttgttgcaggacaagcaggtcgatgatatcaccgagttgatgaagatcgccattcagcaggacatctccctgaatgaccagaagaaaccggcgatcaggaagactgtgctcctgcccaaggtcatgcaagtcatgcaaaagttggtgcaaccgctcgacctcgatcggaaactccgctgagacccacgctgccattgtttcagcgcttccctgcaagactctttgctagaaaacagcgagttcttgtcggagcttaccggattcatcgaaccgttgaaggatggatcgttgccttcattgacgattcaaaagtccatcctcgcccagcttggtcgagtgagtcgagagatcccaagacgaagaaaggactttactaagataacctcttgacctcgatcagtttgatgtcatcgacaaggacatgttgaaggcctcgggtctcggcaagattgtcaacttttacacgcgaaccaaacgtgtacaaccggaaatcacccgccaggccaatcagcttattgacaagtggtccaagcccatcttgcgggcggccggtatcgcgagtggatctgctacgggaaggatggctgctacgggtcacactgaggaggagacctatggtccaggagagggcagcggtgtcatcacagttagcgccaagcaattgaaggagaaggaggaactgatgcaatacgccttggaagctcaacgcgaggtcgccgaagggaagaaaggtagccgtcggcccaacgttatcgtgagtgtacacgaccttgttcaatcatctgacaagcagcttggctcaatcgcttgtcgattcgcagggacactcgtacatcaaagcgcctccttcacgacgaatcgcgaggagcactgtcgagcaggagagggaagacgctcgtcagcgacaaatggaactgcaggcagctttcaggaagaagtccatgttgggagcttctcggtgatgatcggacctcttctctccttgtatgatgacatgtatatatctgaagcctgcgtgatgatgatggcgatccgatagatacctagctagacctttgatgatgacaacgacattgcagccacgcgcgtagtcccagctctgctggtggggaacggatcgttcacgggcgagcctcctctagcctgtgagcgtgctttatccggcgactccgattcaagagtatcaacgatacatctctatccattcacaccttctgatccaaattccaacgtattcgcttgcaagactctcccgtgactgatctggctgcgcaaagatgcctactacgagagccaggtccagctcgcggaacccaacaagacgggagggaagcgatgaagaggtgttgagcagagccggaagtatcgacacaaaggatgtcgatgaagcgacaggtggtgagtcgatagatgtttcgttcagtgcgataatctgaggcagattcctgacctgacctgagaatactgccaacagccaccaggacgacgagaaagcgacatagggagggatcaacggaaccatcttcaactggcggagtacgtgcaatggcaattcattcctgtgtaacgatcagctcatgtacgaccttgtccttgtcttgtattgtttgcaggccgtagtttcgtcaagtctgccgactattgctgccaagaagaaccgtatcgaggagccggcaaggacatcgtcgaccgagtcggttccatctctagctgacgacccggcagggaccgagaacaacacttcggttgatgagacgaggaaaaaggtcgaaaagctcagccacgaggaaaaggcccgcggtttatcatcaaagctgttgaccgtggaagaggaagatcgcaaggatgacgcagcgagcgtagatccggaaggcagcattcacgagccagaggcggagacgggtcaaaagcgaaagatgctcgcccgagccgaaagcgccaacattgtccacgaggaatccgtaaagagggtcaaggaggatgatgtcgaggttagtagtattcttcaggtcttcaagccggggaggccacggtctgatcgttcgctctacctttctaggatccgcctcataccgcttcaacggttgacatggaagcaccggtagtcgatgcaaccgcagaagcccaggttgaatctgttcgacctccagctgtagtagcgaccccagctaagaagccacaagctacttttgggtcgttctcgtcggcggcatcccctttcgcaactgccaagcccacgacatctgctctttcagggctttccgctgggtcttcgttgtcgtccgatttcagcgccaaagtgcgggaggccaacagtctttcaacaacgcccaaatcggaaacaccgactacccctgcgcctgtcaagaaaccccaggcgacctttggagccttttcttcaagcgcgtctcccttcagcgctgtcaagagttcttcagcgtttgcatctcaacccgtcgcatcctcgtcgaatgctaccaccggaagttccttctcgtcttttaaaaacacggtctcgaattcgtcggcctttggtggttggtcatccggcgcggcgtccagtccgtttgccagtcccgccaaaaagacatttaccacggacatggcgggcgaagggaatgaggataaagacgagtctgataccgcagaggccgagaagcctcaggcctcgtttggagatattctggccaagtcggatagcgggccagcagaggagaagaccaaggttgatctggaagagcaacaaggtgggctcgagatgccttgtccgcccccaactgtcggacgtggctaacccgctctcgattgcgctaacgcctcatatagctcacactggagaagaggatgaagacacggtctaccaggtgcgctgtaagctgcatgtcatggatgattcgaatgcatggagggaacggggtaccggttcgctgcgtgtcaacgtggacaagaagcgcagcggtagtgcgcctagactcggtgagcacacgtgctacgctgtatgaactactacggggactcgggattgactttggagacattttcagtcatgcgagccgaaggagtattgcgcttgatcttgaacgtagccatgttccctggaatgtctttcgaggtgaccgacaagtacgtcaggacggtcgtctttgaagacggccaatctcgatcgcttctcattcgagtgagtcttggccgatcgcgacgtattgaactgctttcgcacatactaacaattggccgtgttcgagcagactgcgtcgtccaagatggccctagagttgcgaggcaagctacaacaatacgttcccaaggctagctccaaggacgcgcaagaagccacatccgaggcgatccccgatgcagagggcgatcgagcggtcgccgagaaagtagcagacaacaaggcctaagcgtcggtatagacggcgagatgtgctttacataacattcgcgaacaagtataaatacgttgtgacacttgcccacttgacgatctttcccgattactttgatcagggtcaaactcggtcctggcgattcggcggacacaatgctgcctcgcaagttctgcggaagcgaattgatgaatggatgatgacatcatcatcatcattacgagagcaagagcgagagcgagatcatcatcatcatcatcgtcgtgcatcgagatcgatattcgtcaggagcagggcgacgatcgaaggtaccataggtttatatacaacagcagtaccatagactctactgacactcagaacgcattcgaaacatctttctatcgaaacaatcactctcataaccgcaatcaaacatgttcgctcaatcactccgtaccgttacttctcgacgagccgtcgtcccgcttagggcgttcagctcgaccaggtacaccttggtccaggaccccaagaagcccatgtccgagaggcatgccgttcacaaggcaaccaaagacatggaaggtggacttgacaaccagtctgctggcgtccagtccgccatgcaccaggccgaacacggaaagcccaaccagggagaacctttcgacgttgctgccgaagacaagggaggcaaggccgccttttccgaggccaagagcgaggccttgtcggatgccaacactgagaatcagaaggcccaggcgggtagcttcaaagatcaccgaggcggagagcaaaactcgtctgtcaagtcgagcggatccgtgggtggatctcaggaggccgctgctccttccttcctggctagtgccaagagcgctctcggtctgggaactagcaagaaggagcacgaggacaacaagacggccggaggtggttctgtccgaagcatccacacctccgctcgccgactagccgacaagggagatgctaccgatgccgccaaaaaggacggtcagggagccaggacccccgtcgatggaggcgtcgtcggtgaccagagccctcatttgaagcacaagcgtcccgaagaggtcgacggtggaaagggaaacgtgagttcattcgtcatttgatccgtaaagtcgtcaggatctgcgactgagaaattccctatcgcctgcaaattcaggccggtgacactcctcaccttccttcgaaatcgagcaccgtccgtgcggcaaccgaccagcactctgaccaagagtctcagcaaaaggccagattctctacctctgctcgacagatggctgcgaaacctcctggtggatacgcggacgctaccattcccgaacccggtcaggatggatacgtaagcaaccggccgtgtatgtgtcttgctggttagctctattcactgacgcccttgtactttcgcttgacagcccgttccaggtcaggcatacccttccgctgatcttcacgcgaagcctcccccacctaaccctgatatggctcctgcttcggaattgcctcgttcttcgaccggacagggaccagctcatcccgttatgactaagcaggccaaggagggctctatcccggccagaaaccccccacccgatgccaaagctgggtgagtacacgatggaagctaaatcgatgggtcgacggattgctaaatgagattgatatcgattgatagacaactcggtttgggagaagcttggaaggataggagcgcgcaggtcgacgacaagtagtttggcagaacccgacaaagcatgaaggaagtatcgaaaccgaaatgaatcacctgtaacgtaaaaatgaagcatgcaatgagtcaatgagttcgacgataagccagcgcgagtacaaggctggaactcctggctaacacacgagcgagattcatcccgcagcccgccgaggtacagtctgatctgttggatggcggcgtaccgaacaggacgagctgtatccgtgaaatgatccatcaaatcggtgtgcagagacactctcacgtcgaggcgctgaaacgcttgatgtcatcctggtcgctggaccatacataaagagtttcacatgcatttagatcgggtttcagatcacgaccttctgctgtgatccgagcgggtcaaggatgcttttcgggtcagcccgggctcgaaccttggactccggcagtgggcagatatgcattcgcgatcctcagtaaatatcaagagatcgcgtgattcgtccagaagaggccgaacagagctccaatacgaaggcggtatgtcttctgtgctagacagataagttatcgagtacagatgggcaatgtcgagtctcgtcgtaaaggtatcgttacaggcgttattcggagcgtgagatgaatcgtagttgtcctcctaaggtttgctcctggtcggttcggcatcatcagagttcttgggaagctctacactctcaaccagggtagaaatctcgttaaacgattcttgcagcgagttgacgatcgactgcaattgcggcgtcttggcgttgagctttgagattgtgtctccggcagaaaagagctgtcaagaccgcagttcagcgtcaatttggaaatgtcgtatgtatcaccaaccacttacttgatgatgatggttgtagaccagactatgcctagacgagttcaggttctttgcgtctggccagtactatgctgttcagctcgggcccgctcagaccgcgaacgacagcacaactcaccgtttatcagtgttgtcgactgtcgaattaaatccggcaacgaagcagtcgtaacaagttttgcatagtattgctggggcgagaatccgggagaatctgcaggtatgtcaaggtgtactgcattagctgacggtcgtatcgagtttgtccaggcttgcctacctagatctaaagggtcctctttcgtgacttgggctttgctttgctcgacatgattgtcccggggggtgtctggtcgcttgacggattccgacaatggagataaagaagatgtattggccctcgccaggccgtaatgagctcggagattctcccgattttgagctcgtctccgctctgaatctgacaagccttccatggaaatagtagctgaatttgaagccacaggtctgagattcgagactgtggaagctggtcaaggtatggtactgatcttgctgataacactacgtgacatgcagcgccaggccttatggcgaggacacctatcatcaacgatcaacgacgttcgtccggaagctggttcggtctcttggtgcaatcggccggcttagcgcgatgaaccgaccacgcccaacggctcttgcctgcctgggagaccgaccctattcaatcgtatctagatgcacaccttcttgccgtctcatcattcgaccctcgagataaccgaacttgacatatcggccttccacagtttcatgctgttcgatagaaccccactcgccggccaaatcacagcggacagcgaagcacgagagataggggaagcgagacgcgatttcggccacaacgagcggtcgtcatcgttcaactggatacagagccgactaatctcttcttgacaagcctggtagtcacgttgatcactcggactaggctggcctcttttaacataacagttcggcgccatgtccgactcgccggcggatgcgctgcccctcctgttcggatcgctgaagagcaggtgagctcgcgtacacctcgtccgatagcaggtcctgtgaattgaacttcttcacggtcacactcgcttaggaatggcgatgtaagggagcaagcagctatcgagatcagagactttgtaagcggtcgttccctgttctcgcggtctcagtgctgctgctaatgccgtccaatttaaaccctctttaggtggcttcgtacagcgaagaccatccccaggatgacgctctcaatgctctctggaacgacctgaatagaagggtattctcgctcatccatagcaatcagagcttcgagatccgtggaggtatcactgcgatcgaaaggttactggagactaagaaggatgtggcacctgagaagcacatgcagcgggtgctccggttctatcactgtgagttccgaaataacgtacctctgatgggcaggcccgctgattcctttctctcccggtacagacctcaaacctcttctaccatgcccggatgctgaagtcatggtccaggcgtcgaaggtcctcggtaagctcacgaaatcagggtcctcgactcagacatttcgatctgagccttcgtctcggaatccaggtacaatcgcacaaatcactcaaggggaaggtttctttgattttgaagtggatcgggccctcgagatgatgcgaggtggaggccaggagatcggacgttacgccgccgtcttgatcctctatcagctggccgacaaagcgccagccgtattcatgcgatgcgttgtgtcggtcctggacatgatctggaccccgctcaaggatcatcgggtgagttttgcgcgccttctgaatgcgtacaacgtcgggcggaattcactgagattacacctttttagactgtggtccgagagcggacttcgatgctgctaggctcttgcttcgacctgattcacactcgagagccacatttcaaggcgcagcaatacaagaagatcctggatgaggctgagcgaactctcaataagcctgcgcctagtcaggatgtcattcatggtggtcttcttgcgctgcaaaccctgctcaaccattcggaaatggtacgctactcggcagtccaagcttgaattacgagtgctaacttgacgatgtggcgacttttagttcatgaaagagtactacaagcctacttgcgaattaatcttgaagtacaaggatcaccgcgaaccgctcatacgacggacagtgattaccttgattcccgccatgggaacatacgatcagactgtattcgaggaggtctttctgcatcggagcatggcccatcttcaaggacagctgtcaaagcctggcgagagagatgcaggtaagttgctcgtatctccttcagatcgagcgtcgaacccctttttgacggtcaagcactcctcagctttcttggctattgggcatttggctgtgaatctgggaagcgagatgaagcctttcatcgaagagattatgaagaacgtaaaggatgctttgcgtcagcgcgggtcagtaatcgacgctcgtgtccagacgccatcatccgttgaggctgattttacggctggaccttttgcagcaagaagaattcgcctgacgagaaacccatcttccaatgcgttgcgatgttggcaacagctctcggtcccagcctcacaagacatatgcacgaagtgctggatctcatgttccaatggggattgacggaaccgctgagacaggctctggtcgtcatcgctcgccatatacccccattgctccgcagcatacaaggtcagtgagacggtgttgatgatcatagaggcgagcctaatattcggcgcatcccacagaacgactactggacatgttatcaaacaccctgaccggcaaaccatatagacctttgggagctccgccgccccgaatatcggggacgaacaacaatacgggcgatgttagtccaggccgcatatgtgacaagagctcctcgattgacgtgtccttcgctaccgcaggtgaacaccatggatcacagccctcaaatcatttctctcgcccttcatacccttcactcgttcgactttagcggtatgtcgccacgacttgcacgtagctctgcaacgctaacgtacaagacgtatcctaggtcataccctcaatgaattcgtacagcatgctgcccttccgtacctggagaatgacagccccgaagtgcggcaggccgccgctatgacgtgttccaaactcttcgtccgtgatccaatctgccaccagactagcacacactcaatcgagatcattagcgacgtgctcgacaagcttttgacggtagcaatcgcagatcccggtcagtaccgatgccaaacctgagaacgttcagcactcacaaaaatctatttttccaatagactatcgaatccgtacttcagtcctgcggtctctgaacgagaagtttgaccgtcatctagcgcaggccgagaacgtccgctctttgttcatcgccttgaatgatgaagtatttcagaaccgagaactggctatcgggatcattggcaggcttgcagcccataacccagcctatgtgatgccctcgctacgaaaggcgctgatccagctgatcacagaattggagtattcgacggcaaggtgagtcttgcgaagtggatgcgacggcgcgagatgatactgatcaatcgcgtctgatcgggctttgcagcaaacaaaaggaggaaagcgccaagcttctttgcctgttgatcgaggcttcatccggagcttcttctaccctgatcaagccttatgccgggccattgctctccgtactccttcggactgctagcgccaaggatacgaatccagccgtggcatcttactgtcttgcgtgcctcggtgaactcgctcgggttgggggcgaagagatctctccaagcgtcgacaagatcatggccctgatcatggagatgctggccgaccagacctcttcgttgaagcgtgatgctgctttgaaaactcttggacaaatcgcgtccaataccggggcggtcatcgagccttaccaaaagtatccgcatttgctaggcatgctcatgcgattcttgaaaaccgagaagagtcagaatatccgaagagagacgatacgaaccatgggaatgttaggagcgctcgatccttaccggcacaaagtgagtggttcatcagcttcttgccagtacttgggtggctagctgaccgtattgtaccagctcctgcacgacgagaccgacgagcaggacgcagacgcatcgggagcgcgagttacggacgtgcagttgctcatgaatgcgcctggcaccgcaccagacgaattctatcagacagtgacaatcaacgcgctggtgaacgtgcttgcggatccgactttgacgaacaaccattggtccgctacggaagccgtcatgttgattttcaccacacaagggttgaaatgcgtcccctaccttggtcaggtacgtgtactgtcgcgctcatggattgtacttgtttgggctaatcggatctcgaaccagatcatacccgcattcttgggagtcgttcgcctggcacctcccagcttgcaggagacatactttcatcagctcgcactgttggtcggtatcgtgaaggcgcacatccggaattatctgggggttctcttcgacctgatccacgacttctggaatcccgactcgactcttcaattttcgatcacatcgcttgtggagtcaatagcgatcgcggtcgaaggccagttcaaagctttcttgccgaaactcctgcaagagatattgaggactttcgaaggtgacatctccgctggcaagctctctgatcgccggaagcagaaccttttgaggatgatcaaggccttctacgtgttcggagcaagcgtggaggagtatatgcacttgattttaccggttattgtcaagtgtttcgagcggacggacgcgccgtacgaactacgagcgacttctatccagacgatcggccacttgtgtcgaaaggtcaatttcagcgacaacatctctcagatcatccaccctctggcaagggttttggcaggagacgaacccgaactgaaggttactgctatggacacactttgtgccatcgtgctgcaattgggacccgactacgcaatctttataccaatgatcaacaaggcaagtaactcttgacgttgcagagtcgtgtcattccggctgaccccacatttcatatgtatgaccccttaggtcttgctgtcacaaaaggttacacacccgctgtacgattctttgatacagaagctgcttaaccgtgaaattctaccggtggatatcggactgcctgatccgtaagctccgactgtacctagtacatctagccgtagattatctgactggccctgcctctgtagagctatggactcggcggcaatagcgactgtggcacaggaacagaatcgtatggtcgttaatcagcaacatctcaagggagtttggaacacggacggaatcgctgcggcaaacgactggaaagcctggttgaaacgacttggcctggaattgatgcgacaatcaccttctcacgcgttacggtcctgccatggccttgcagaggttcactcgccattcgggcaggagttgttcaacgtggccttcatttcttgttggactgagctctacgaacagtaccgcgtaagccaggtcaatggaacttgattgctcttgactcgcgctaacgtcactgtaacgtctattgtgccattcatgcaggaggatctggtcaaacatatcgaactagcaatttcgtcaccgaacgttccgtcggaggtggtcataaccctattgacattggccgagttcatggagcacgacgagaagccccttcctattgacccgaaaatgcttggagattatgtaagctggaacattgatagacttcattcgcgatatgctcattttctcggaatttctcgcaggctatggtataccacgcatatgcaaaagcattgcattacaaggagattgaattctttgctgagacgaccggacccattatcgaggacctcatcagtgtcaataccaaactgcaacagaccgatgccgcttggggcactttgaattttgcgcaggagaccactctatcttctcagcatcaagaagcttggtacgaaaaattgggccgatgggataaagctttggacctttacaaccaacgagacggagaagacactgatgacccggacccagacgtgattttgggcaaactacgatgtttgcacgcgcttggccagtgggaaaatctatccgactttgttcaagcacgttggacgaatgccccatacgaagaacgtcgacgcatggctcctatcgctgctgctgcggcctggtcgctgaaccaatgggacttgatggacgactacatatccgtgatgaagaccgatactccggacaggccgttctaccgagcgatcttgtcggtacaccgcaatcagtattcaaaggcgcttagccagatcactcgaactcgggatctcctggacggggaactcacgtccctttctagtgaaagctacggtagagcatacgagtcagtccctacctctgttccgtacttcgcgtctcaacctcatcatgtttggtcataatagcgtcgtggtccgcgtgcaaatgttgtcagaactagaagagatcatcgcctacaaacaatggcatgatcaaccagctcgacaagctatccaacggaaggtgtggatgaagcggtgcgtcttttcttgtgttctcttcgcagcaattgcattgctcagccatgtcccgcctggtcccggatatcagactcaaaggatgtcaacctgacgttgaggtatggcaacgtatcctgcaagtgcggacactcgtcctgtctcccgttgaagcgaccgacatgtggatcaaattcgtcaacctctgtcgcaaatctgatcggcttgacctggctgcgaaaactctcaattctcttctcggatcctcctcgttgggaactgacgtcgaaggcggcagggctcctccaaatatactctacgcatactacaaatttacctgggctaagggcgatcgggtggagagtcttggctggctgcgagaattcactgccaatctggttcgcgatgtgcaattgacgcaggtaaacggacgccttgttgccgcccaccccagtaacgctgcatacactgagctgttagcgaggtgtcatgtgaagcttggaaagtggcaggtggccttgcaagacggatggttcgcggtaagaatcgattggcttggaccgaccatccgcatttttgctgacctgttcatcggtccagaacaacccgacggagatcctgaacaactatgcgtatgctactcaacttgacccggattggtacaagggttggcacacttgggcactggcgaactttgaggtgatcacgtatctcgaggtccagaagactgtactggcagcagacgctttcaacgtctacattaagccagccgttcaaggtaagctccttcgtgctgtcaggagatcgtgctggctggctcattcgatgaggatgttgcagccttcttccgttcaattgcactgtcccgcggggattggctgcaagatactttgcgtctcttgaccctttggttcacctatggctatgaacaaggggtcaatgacgcgatctccgaaggcttcaagactgtcaacatcaacgtttggttgaatgtcttgcctcaagtgagaagccacagattgcttacatccgctttggccgctgactcttgttcattagattatcgctcgtcttcacacccctcgagagaaggttcggaggctgatccaggagttactcctcagcgtcggcaaggcgcatccccaggctctgatctacccgctcacggtggcgtccaagtctcaaagtgttcatcgacgagataacgctttgcagatcatggcgaagatgcgcgaccacagtgctactcttgtcgatcaggcgaccctggtcagcactgaactcatccgtaccgctatcttatggcatgagcagtggcaagagggtctggaagaagcttcgaagcactactttggtgatcacaacccggagggcatgtttagcgtactggaaccgttgcatgaaatggttgcaagggtaagccgtgagaagacacgtgccaagcaaaaagattggggctaatctcgtgctctcacagggtcccgaaactctccgagaaacttctttcgtgcagagtttcggccacgatttacaagctgctcgagagcactgcagacgattccgaatgtctggcgaagtctcggagctgaatcaagcctgggacatctactacttggtaagctcattgactcaataaaagatggatcgatatgctgacggggctgttgtaggttttcaaacggttatcgaagcaattggcaacactgccgtcgattgagctacaatacgtatcaccgaagctactcaaggttcgggatctcgagctggccattccaggtatgtcttcctgctacaaactcagctagagaaaaagatctcttatcaggtcacgtaccggctgtcccaggaacgtatcaaccgggcaagcccattgttacgatctcttacgtcctaccgacattcgccgtcatcggttccaagcaaaggccgcgcagattcagcatgaagggttcagacggaaaggagtatcagtacctgttgaagggtaagtttttgaaccaagtcctcagaaaagaaagtacaaaccactgatgatactttctctccaggtcacgaggatctgaggcaagacgaaagagtcatgcagctattcggactggtcaacacgcttctgtccgtcgatcctgaaagtttcaagaggcatctgcacatccagcaatacgctgtgatcccactttcgtcaaattctggactgcttggatgggttccacatagtgacactcttcatgttctcatcaaggattaccgggacaaccgcaagatcctgttgaacatcgagcataggctgatgacccagatggcgcccgattatgactgcctgccattggttcacaaggtcgaagtcttcgagcacgctttggacaataccactgggcaagatctctaccgagtcttatggctgaagagcaagaactccgaatcttggttggagcgacggactacgtatacgaggtcgctggcgacgaatagtatggtcgggtacatccttggactcggagatcgccacccttcgaacttgatgctcgatcaaatcagtggcaaggtcattcatatcgatttcgtaagatcgcgctggacatttttcgctgcctgctccctcactgaatccgtgtttcccccatcgcaatgcatacagggagactgctttgaagtggctatgcagcgtgacaaattccccgagaaaattcctttccggttgacacggatgttggtgaacgcaatggaagtcagcggtatccacggaagctacaaaaagagttgcgaggtcacgatggatgtgcttcgtgacaacaaggattcgctcatggctgtgctcgaagccttcgtatacgacccactcattgcctggagattgatcgccaacgcgacaaaggataccgagcgcgagcgtgagtctttcggaagggacatgcggtcatcgagcagagtctgacgtgcgcggcgttactggcttccagccgagcccgcccaagatggtcgaggatatcccggtcagcgcaaaaccaaaaccgacgaagctcaaatcataggtaagcgattgcgattcgagtaaacaatctaggactagtcttacttaggcattggatgtcttatcagatggtgaacatcccgagatcaagaacagcaaggctttggcagtaatcgaacgggtgaaaaacaagctcaccggtatgtttgctcgttttggtccgttatcgcaagcagagggctgatgcggatacatttaggtcgagatttcaagcccactgtgattctgccggtgcaggaccaagttcaattgttgatcgccgacgcaacgtcgctggagaatctctgccagtgcttcataggatggtgagtcactgctcaaatgatccagacgatcggctaggcgtggcgttgatgcattggcttgcgcttccacaggtgtgccttttggtaatgacatcgctcttttacgaatcttctcacgaccggtgtggttggagctcaggagtctcgctcgtcattccgccgtcatgttatcattgtatctgcatattcgtgtaataatctagtccagaggggcacaagtcaaacaggaatcaaataggtcacaggctcacagcgttattgctaccggaaggtcgggtgtaaatcgcgacattgtaaataccggttgattgcatgctcgacctacatcgaagctccagacatgcgagacatggtcatgatcaatcatttgcctcaccccatcaagcggagcgaatgaagtagcaagctccgggccacagatatagctggagagctggcaaatatggaagctacattgctggctcagtctgtccggagtacgccacccatcggcatcatgaggtctttcaatatagctgattcggccttctccttgtcccgctagatttcaaaaagattttgcaatgtatcgcccggtttggcgacgagctgcacctgcaggcgacgcatgagggtgtgagtcgggtctttgtgagcatcaaacgatgctggactaaacttctgctcgtgataagctacaaatggctactgtgaattcctctaagacagcgttttgtctgttttcactagccgccgatggtttcgataagtacaagttgacgggaaaaagctccaatagtctggaagggatcagatgtaaattgcaagtcaaggtacgtcctacagcgaggtttcattgcttgccggtcaatgctaacgtcgcttgtgacaatcgaagtccgtattgtctgtgctgggaaggagcacgctctcccagaacatcctgcggttggagatgcggatcgaagacccaagcaaggagcttaagggtaggaggccaggacaagggcgtgttgttgataacgaggatgaaagcgacggagacgtacaaaccaattcgagggaatctcggttgatcttgaaattggtctgtagacatggtgggtgcggattggctcccttcgaaatcacgagaggctgagcgtatgtgacatggcaggcgtgatcaagacccacctcctcaacctcagcgcttcacccttccttgtggctacggtggatccagctactttgaccaatcatttcctggttccggctcgaacgcttcgcgactggctagatcattttacggccgctggatcgactatagctagagcagggtcggaagcgacgggaaacgtgaatcgtcaagagagcgaattagggtggtactttcatccagagcaagtcagagtcaagacatgggaaagcggctcggcagcacgtagatcgatttccaccgagcttaaaatcgctgtgacggaatttgacgagtatgaaatatcggaaaccgtctgtctaacattcccgatgagagagttcagggtcagtcctcgatcgtcgtagatccaattcgcgacgagtgctgatagggcatttgctacaggcggccatcacgctagccgacagttggggaatcccgctgcataccgaattttctactgctgggcagcctctctctttgaaactcgacatcgaacacatggtcgccgatctgacgattgcaacaacagaaaatgaggctttcaaagacctcatcgaaggagggatgtctggttcaaacaagccgatcaaacgggagttggctaaacctcagcggggcggggtcggcaaccaagcaaatgctgtcacggccaagacaccggccaaaaagaaaagcagcctcaagctgagtcgagaaacgacaccgaaaattccgcaagccccagcgaacgagcttcaggatgaaatgcaagataacatcggtgaaggaaacgaaggagacgagccattgttctttcccagcggttcccaagacggtccacgaccgctcagtcaagccgagttgatgcacgcagccagtcagaaagagctggagcaaatgggcgcagacgaactggcgggtatctgggaagaggacgagacgttcgagatggacggtcatgagcaaaacaaggcagctttgcaaggttacgacgatgacgaaaggccgcagaagatgcaacggctcgagggcaacgcagaggaattattaggaaaatcccttctcgccttcgatcacgatatgaatgaagaagacgacgaagaagctcctatgacagcgcacgagacacaggatggcgataacactgtgagcgacttcaattgcggctctgttatcgtaccgtactaggctaccgctaacgcctcgatctaactcacagtatcgaccgctcttttccgaataagcccctctaaaggtgccaaaatcgaacatgaacttcacgactctgtcacgaccacaaatctatgtctttccgcatctaagtaggcgttagccctgtcatgattacactgtcgtgaactgaaaagtatcgttacaaaggacaactagtatagcctgccaaatctcgcagtaactgtacactacgatagcacagccatagggcagggaacgtccactttacactccctatatcatcaacagaatgatgcgatcacacagcgcttccagatcaacgacctgtaggcgccagagcagctgatcctttgcgtggctcaaaatcaacgagaatttcttcttgctcatcgacgcctcgtcctgtacgacgtggatcatcgagcgtatgtcgcgtgggcaccgcgacgaattttgcatgctgctcatttgatagccttcttcgggcgccgttgagaccgttcaaagtagaggtatggtcatcataggcgggcatgttagttggatggaaagggggtgacgacgcgtttgatggaggcggcgaaggaagtgctgtggacactgatgggtacggcacgacgtagccctgctgagtcccccggttgatcttgctatcttcgaaagagtaaccgcccttgaccgccgtcgagtgcgagattgcgggcatggcgtattggtcgctaaaaccatacgacggggcaggcgaggcgtagatccccttttctccggggatcggcgtgttggtctcgctcctctcgtcgagcagcctctgatcggccttgttgagaggcagcatgccatccttgacggcttccattcgcctgaccttcttttctcccttttcgacatcccgcttggcggcgttgtacatccacagaccgatcccggtcagggcgatcccggcggcctgcaccgggtgaaccttttggttgaaccagatgatggcgagacagatcacggcgatacgcttgacgagcgatgcaatcgagtacgtgacaggcgatgtggacgacaggatcgcaaaggcgagcaagttttgtgcaaagtgcacggtcccattgacgaaaaagtagaacgggacgctgggcggtgcacctcggttgaccttgactggcaggtcgacgctgtccgggtccagccagagggcgatcaacgtgggcatgtccgaatacgcccatagcgggatcatagagaggaaggccattccggaggagtagaataggaggttgattttgtctagttttgcgctggtctgcgcggtgcttagtggattgccggcagctggtccgtgcgcagacgcgctaccggtcgaaggcatcaactttttgaagacgatgttttgagaaacaaagactagggtcgagccaaatgcacagacgagtcccaaaatgttggaagccgagacgtcgaacgagcatgcgagcatgactccgagggtcagaggcaggagagagaggtaagtcgctggcgaataggagattttgaagaggatcgcataggcaaggactgtgaagagcggcgagagagcctaacgagacgttggggtagagtacagtcgagctctagtcagcaatttgcgaggacatgtcacatgatcgcgtcgactcaccttgattgtgtgcacggtgctgaccgggactcgactgatggccatactggaaaagatgtgtcctccgacctggaagacggccataggccaagtatttctcaagatcgccttgctcggcgacctcaaccgcgatcctcccgcctgcacttgcgtcaacgatctcgacccggagaatcgccgcaggatggctcgtttaagcacgttcaggccgagccacgaacgcccttctgtgaggatccagcagtaggcagcgacaaagaagaactgtacgatcgtcaaggtcaccgggaacttgaagttgttgagaatgaccttgcccgagttcgaggagacggccgaagtgccgtaccatagtgtgcataggaagatgaatttgagcgtcgatggcgagggaaggggagaggagagaagcctggccaaggtgctctgaaatggtggtgaagagcttgaggacatcgaaccgccctgccgtcgatgttggcctcccggtagagcgtaaggattgctccgagggtcaaagggtagaggttgagggtaaacaacggacggccgtttcgtaccttcgccgttgtagatggaagaggtgtaagtcacatcaccgtgcggcagatatccgttcggcttgctagcgtccaccggcgattccacccatgttgacgagtcgacggcaccacttgcgacgggactgcccagatagccgtttagtgaagagctgccggcttgcgagcccagcgttgcgttgagcttggtgaggtcgacgacggaacggtcattcgagacgtagggtgctcttcgtttgtctgccatgacaggccggaaaaattgcagcggagagaggatccagaacagaagccgggcagaaaagacgttcgtttgccagtcgaggtcgtgatcgtaacgtttctctcggcagttgcagggcgacggtgtctatgccgattcagtccttgtgcgtgcgtgtagcgagttttcccgcaatgaatgtcgatacaaggaaataaggcaggcgatcgttctaagcgtggacggggtttgtcaagacctagttggcgatgtctggtatcatgttggatcgatctggccagtttgatcggttccgagcgaattgaacgaattgatcgagacttttaccagagcaggatggtagagaagtgagtagagacagagagtagcagcagtgttgtgctctattcctgtggctgattgttacttccgcgcactttgacctgctctctgcctctgctgccgctgctagccagatccgaacaaagaacaaggaaacgcgtacaacaccaacatcaagcttgcagttataatctaggacccaaattatttacttccacagccctctcctcccccccccaccccgtgtgcaaccacgactgaccctactcacattggtggtcatcaccgtctcgtcaaggcatcgatcatctgcatggagccagcctgtttgaccagtgagtcaagcactcacaacacacggctcgtgttttgtatcgaccagtcagtcctgcaaatccggcctctcacctcggcgagacagtcgatacacaggtgaaaacccaaaagagcacacgttgttcctggcgcgcttggaccagaccgcgcaaccaccgtgataccgccggaacctgatcgaccagtcatccggtacaatggccatgctggccagacgtggacaggacaggacaggtacggtgtcggatgtcgggtcgggtcgcttcgctccgctttgatgggcttcctcggttcgtgaccttgatctgccggatctcgcatagatcggggtataaggttgtgccagcacattcagatacaacgacttcccggaactccacatcgtatcgcgtttcgcattatagcgatcgcatacgaacctcgaacgccaagatcaagtgttgccatatgccctcaaaaggcgagagagcctagagcgagcggagcgatgacgatcatcgttggatagtcagcgatcatgtgactaaccgcacgtcccgcaggacgggatgcttactcctctctcttcatgttggactcctgcaattcctgtcgaagtcgtctgttcaacagctctcacgtgtcaatgacacggccaatgagaaaattcccggtgcgtcggccgctcacatgttctctagatgcaaatcgttgcgtttcgctttcgtctcttggaggtcctttgataacgccttgaacgcctcagtgggcggcagttgcatatcagtgaacaagctatcgagttcgacgttgaaagtctatcgagcaggcgttacagacgagacgccctagcggtcaatgccacgagtgtaaaacagtatcaacgacatgcttacttcatagaccgtctctaattcggctgtcaagtctcggatttgcgatttcgcgaggtccgccttcgaggtcgctcgcgctaggcgaccttgcaggctgtttacttcgagcgaagactacagtcaccgaaaacgtgcaatccgaatatgttaacagtcgataggaagatcggtctgttcatccccccgagactgaccgaaatcgcttgctggtggtatgtctctgcctcctcccgcaactgaaccttgtcgcactcggctcgtgatagattctcggtcacctgctcgagcaatccagtggcgtggagcacccaacggtgaacgaacgctgcgtctacctctggcttgttgccgctgttggctggagtccggcgagaggagagcgaagcagatcggtcgttttccacggaaacatgcgtctggcaacgctcagcggacgatctgattagaaacacatcttcgtcattgctgtacgtcgtcaagatttagcttacggataatttcctgcttggcggggatcttatcaatcctggagatccctccaccaccaatttctgtctctgttttgaagccacttcctttccgatagcagaatccaatctttcaagctcgatcttgagctgtcgaactgtcgagatagctttggatgactgaacaggaagcgagctccatcagcaggagctccggtgagccgtgatgacaaatcgacttacttgtccactagaacctgggtcccaaaacacgtccacctcggactccaagggtgtaggttcgaccagcatcatctggggaggaatgatgccggagtcactgactgcgtgcggtgggtttggtaaagctcgtgatgacgaatctgtcccgccacataattcgtcgccaagaaccttcggcatcgtgtgcctatcgaacgatcgcttccgtggtgcgagagcttcgtccgatcgtgtgcgcttgtgcaagagcggcgacgtaggcgaaacgtcggtgatcgtaggactatcctttagcggcatggtttcccttccggtcgaaacacgccgacctgcgccggagaccaccctggcacttttcgaggtgccggcaggagctatagaccgttctcgcttgatcgtcggctgacgtggcccgagcagtcgtcccggcgatactgttgctgaaacagtatcagcagataaggtcgaactagtgctttcagggatttccaggtccatccctatcggtcgaggtgatggtagaggcaaaggtctgggtccttttgtaggagatggcgtgcgtcctctggacaggttcaacggcctggtggcgctgataggcagctcgattgctttgatagttgtcaattcctctgaatcgtctgccggcggactaggcgtccaatttcggacatgcagtgctcccctgggaggcgacgtcctcgagacagctatggatagcgtgtcagcctggctcctacttccgctttcatctcgcgccaccttaccagtcctcgcaatgccgcccatctcggatgcgttgtcttccagcaaagccctcattacttgattggtggaaactgagttgaccttggcaagatcaagtcttgcgtttagatctgcctcagaatcgcttccgatttcgttgacagcgaataagccgggcggtcgttccaagccgtgatccgttgatcgcctttcaaacgtgctcctagcaggactcgagtccttgacagatttcaagctagaccccgggtgatgatcggaatctagcgaggtagccgttgttgatctagtgtccatcgagaaccgagaagtatccaacgttgaggaacggctaacggtcgattttgatctggaggacatgctctggtgaccaaagaggcttcgagaaatggtgtccaatgtcatcagaccgggccgactccttgtgctggttggagtcgttggctgtgacgaagaaccgggtgcaggcgtagggatgaggcctcctatagagtggactgtacgaggacgctgctcagcgcatgtggcctaggggtcggcaggtcataggaaatttactcatttggatagcgcgaccgatcgcgtcactgaggttacattgctcctgatcacggtctatccgcccgttttgcccgtaagaaatggacacgctgattgggagaaagcccgggtgtaggccgatatgtgagtcgagttgcgatcagacgcagtcatgcagttacgagccagttggacttactcgcatcgatcgtggcggtagccacctatactaagtacgacggaaggattcgtgttctcacccacaataagttcactcgagcttgaactcgattccacctgtagagcggccttggtctttacggtagattcggcatcagtcataaccttcctgagtaaccttttcattcacgtaccttgatgtgacttccaagccaagagttttttggccacacattggcgtataaaacaactgcttcgcgattgcgtccgtggatctccacaatatggttctgagttcccctatatgccttgggtaaaccgacgccttgcgactgcatagagccttttggagccgaagcaatcggtttcgtgcgcataagcgcctgagccgtccagacattcttgacaaattgctcttgatcgcggtaagccaaggacggatctgtattgggcggcaaaggcgggtgcacgaccgcgaaattccgtacaggtcgcccagcccacttgtcatgctggtcactcggtggcgagcggaattgcagctggaattctgcatagaccctcaataagctactggtctcctcgcgacccgacctgagtctcctcacctcccgcctctgaaccgaccgcggtcacatctagcaagtcaacgatccccctgaagctgagtttatccttggataaatgtgcgccgctatgtgccaaaccaagcaacccgccacctcccctcatcatcttcttaagatcatctagacctgtcgcttttctgccgttgacagcgggatgttgccttttcgcaatgacaagcttatcgtcgaacaggaagagcgtgcaattgaggttcccgttactgctggaaggtcctgagggtgacagaggtcgtccggatggtgataggctaaggttggagaacgatgggttcgatgcagaaagatgaaggctcggtcttccttgtaagcgctcgaacacgatatcatccacgtcgatgcaatcgataaagtctcgattgttcgatatcagattggcctgatggcggtgacgaaaggatcagcccgccttctgattgccgctcagtttcgagagatttgacccactggaaagccttctacagttcgttcgagacaatacattacggtcgcccgcttggtccgctcatcagtttcgcacatagcgatcttagaggcgatctcgatgcattcctccagtttctgcctttgtatgtcatggggccccatgcagtccagcattcctgtttgcgtcagactatcagcgcctgctttgaggctgcgaaggagagagcatacataccctgccagagaagcgtgtatcgaggtattcgctggaccggctcagctagaagctcgcgaatccctatgttaccgataccggacgtttggtacttgacggactgcagaggatgattcagccatgtatgtatagattcaatcaatgaaggccagacacggacgtacctctgtaaaggtttcgaaggatggtcttttcaacatgctacggaagcttcgctgagactcgtcctgcttgtcgtaataagtccgataacaatcgagagtcttgatttccttcaactgaatgaccaggcctcgccaagtcagatcaagtttcgatgcggtattgatctgttgcaagcccttacgtgataaagacagacatccccgatgtttctgtctctcgctctgcccgtcaagtctacttcctgcaaatctcggcagaatccttccgcagcctccacaattgcgtcgatattggcgaacatgaccttagcatcatagaccggtatgatcatggtttcggaccgtctcgcgaatttgcgcagaggatctgcataagactgtatccacgaaagcaacgagcgatcagcttcagtagcgagacagaagactgggccgtcaaagcggctgaccgtcttcaagcaggttatccgcttcaagtatctagtttccgtatcctgcaactcgtgcacaaggcttgcaagcctggccttgtctactttcgcaggcttggtgggagttcgaccaacttgatgtcctggttgatcgccattgctgttacttccctggctgcggtgtgtagctataccagtcgaagcgttgccggcgtatgcagatgtgtcgatagggactcccagttgcttgatgatttgctcagcagctgtgtatataaatccaaaatcagctttctcctttggcacctgcaactagctttcctcgcctgaccttcggagatgcgtccgtcatcgtccctatcaacgatgacgtccagcaatatcgctcgcctagcggccgtttccatcacagtgttttcattcaagtcacccgcaggatccagctggatcggagcgcccaaaggaggtagttgcggcaattgtcgatctcgattctgaggggaaatgacatcacggccggtcggtcccgcagatgcgggacggcgaggtgttgagggcagcattcactttggcggacaccagcatgaatacgagaccaggatgtcgtttgtctaggcgcaaggtttcatgctaaattgtgtctcgaatacctccttgaacagcagggcaaacaggcatacgaacgacttgcaacttgatccgagcttctgattctctggcctctgatgaacagagacattttgtagctcccgagaacaaaacaaacaaccaatttccacgcgacgcggccgagaaagcctcttcgatctctccagctgtaaagccagaccagcttaattcaaggagcttcaacaccgcaagatagagcaaatgcctggcttgtaattttatgattcactgcagtggtggtgagtaccgagcctgctcagagccgctcgaaatgcgtgcataaataacaggactacgatgcgtgccgtatatctcacggctgacgccatgtgagacatgaaatgaccatagtgactcgttatgacaacattttttatcatctatatcaccatacatacctgacgcacctgccagagacagtcttaacacaggcgaagagatgggcagacatctgtatatgagcgaaccggatcagcgtgactggaacagtcaatattgccgatatgataaacaacccaacgcaagccgcccaggttcgtggtaaaagaagcctggaaaataaaacgtaaggctgaatccgctttgcgtgtctggcaaacgtaacctggtcttttccccattatcaaggatagggcgaaaacgatctaatcaggaagagggcagtgcatgagccaacgcgggcgacgagaggcaattaccgtaaccgtatgccggtgagatatctacaatcgataaggaatgctatagcacaaacaagagcaaatagactcgcaggtcgagcgcgagcagtacccttttttcatcacgtcacatcaaatgtcgaccgacggaaacctccaatgcacttgcctctttagtgcctagatatgcgctttgaagacaggttcgctgatgaacttggcaacgaccctctgacccccgaagagccgtccgttgagaccctggacgcctttggccgccgagtccaactctgtgaatttgaggtagacatctccctatatgatcgagcgcggtcgtcgtcagtcccatacaccaaggtcgtactaaaagccggctccttttcacctgtgagttcttgtcaatgacaagcttgtcaaccggtccatattttgattcgatctcgcccttgatgtcttcagcgagatccaagtcccattcaggacctgctttagtgtctctgagatcgaaggcacattagcgtcgctccttttgcacatgctcaggttcgacttactcctcagtgaacatgttggacagctgaacgaattgcgtctgctgggcaggaatgtttaaacgattactgttcgggtacgtaagcctgtcagcgtgtctgactagattgccctcgaccacatcgaagttgactgacgtcgcggcgacaggtgaggtcatgttgccaggcacgctgggatccggttgtctggccagcttgtacatgagctgctgtcgagcagaggcgtccatcttcgtgcctacaatcagatgctggggatgagcggggagggctacagagtcgctgcgatctctcttaccatagttgccagtgtcttctagctgctgctcgacaggaggtcggacttgacccgcagaagtacccttctcgtgaacggtagagaccttgactgtaacgacgtgaccagtagttgtcagatatggccaaggtgggcttgactgtcttcccgacttactcgaacgacctgccaactcgaatccattcatggaagccaaagcttgtttagcaggctcgagctctgcgtactgcacgaaagcataacctcgacttcggttggtctgatcggcaataactagtcagctcaacatgctgctgcccgacaatacgttgcgctcacctgtggttccatcggcaagtcgacaaaagccaattcgccgaacggttcaaatacctgtctgatatcgtccgcgctcagattgtaataaaggttaccgacgtagagacggtagtagggaacttcagcatcggcattggtgtccttgttaacggatgccgggaggccaggaatgttgggtcggatagggggcagcgagcccggactgtaacgaggtacaaagcagacgtcaggattctttcctgtcgatgcgcgcaatgcaccgagacttaccccgacataggagcccccggaatggaagacatgctggcaatcccttggttgttcctctcagactcagtcaaggtgaccatgataggcagacccataacgatcgtcccggtcaaggcgatggcctgtccgacaagttcgacggaggacagctcgacataagcgattctgtcgaacgacattgagatcaaatcagcggactcagggattagatgattcgagaccgggcacgaaccctttcgacctcctggtgatacggtcagtaacgactctggcgtcgcggacagaacctcgcccaagcttgtcttcgaaaaacatgccgacatccctgctggtcagcttggcagccagttgcgaaacaaaaacagatcgggcttcagacgcagcctcatcgatgagagcggagacctcatcccttggaggctcaggtcgtcgaggaggagggacgtcatacataggagatcgtcggcgaggtggaggcgatcggcgcatagggctgtaaaagcgggagcgagataagcccacctgcttgagatcagactaccaaggcaatgactgaccttcggcggtatccaacatccctcctctagtaagatgaagtgctttagctgagttgcggactgacctattgcacaagcattggcttacatcgtcgtgtcgatctctcgggtatcgctcgcgatcgtcatatctcctcgaatccctagcatcaggagcatcccggtcccggacccttctctcccgatcggcgtcgacgtcacggatggaagagcgatgcgacctgtgagagcggtgcgatctatgagactccttcgatgcggaacgatctcgcctagaacggtgcctcttcttttcatcgtcttcgccgccatcacggtcacgctcgatgtcgcgctccctctccttttcctttcgtcgcctacgtctctcctctcgctcctcgtccgtctcctcttctctccgacggcgatgcctttcttctctttcctctggcgtctcttcgggtctatcggtgcgatccgagcgcttcctgcgagcgtcacggtcttcgtctacttcttcctcgtaagcgtggcgtctgcggtgacgatcttctctgtggcggtcacgatcacgacggtcatcttcccggtcattcccaagctctgaagctttcctaccagactccttctcacttctgagaataggaaagatcatgatatcagttctgatggtccaccggctacactcgctcaaactgacttcagatctggggtcttttctctccccatggggtcgtcattacggggcgaaggagtatcgttagacatgatttgactaacgtatccggttgaactagctgatatcaggagcgagtgcgcaatcgctgctcttttctgacgatgtgcatcttgaaggttagtgtcacgaagtgatcaagctacgtgacaggtcaagggcgttttccgcgcttccaattggcaaccaagcgcgcaaagaccggccggtcatggtcatggtcgccgggcgctggcggttgatgttgatgatgtcgaaccagattcgaggtgcaagtctggctgtataaaataatcgacccagcagcctcaaagccaaatgtctcgcttgtgatcgtaaggatggccaccgctgcgcagagcaaagccagaaacaggaaagaacacgttccgctatataacgaaagtcaagtgcagattcacccggaggccacggtttgtcaagatgccgtattcaagggcaaagtgacgataggaaggggtgagcggaggtggtgccgatccttacaaatgtcaactcatacgcccatgaatacatgtgtatgatgtatgacacaggataggcacggtcatccatcccatggctcaaattttagcgcatggaggagagatcatcataggcgaagattgtgtcctagcagagaacgtcaagatcatcaatcagtaggtgattaccacgagatgaagtcggagacaacgattaacagtcctcgcctattctccgctccgtctagtgacgcctccatcacgctcaaaatcggcaacaagaaccattttgcgacagattcaacctgtcaagcatctgctggggattctaatacctttggggctcgctgtcaggtgttgtcagacgtcctcgtctcggatttctgtataataggtatgtacagtgctatcgatgtgagtgaaatgtaccaagctcatactcggctcgctaggtccacagactacgctgcaacgcaagacgatagatccgtctcaacccgaaaccatcccaccttacaccgctacattcggtgcgaattcgggcagaaggatctggaacggccagacaacgggtcaagaagaccaggcgaagggaaagcacctcgaatacctgcgagaggtactgcccaagtaatttcgcgtcagacagcggtccgacctaagctatattactgacttgcctttcactgccgctaggttcgtgaggatcaggaggtgataggcggcctctgtcatctcatcacctgacaggccctgcagactcatgtactgacaagtggcggagcaaaggaaggcccatggcagcgtggatcaagacctcatgttcgtgccgggtattatccgtatcagcttccattggctgtcgttcgaatagcacagcctagtaattcgtttactgtgagattggtgtagaccctggctagcttggggtcgagtggaaaggctataccatgtagtatttggtagaggtgcattagcaatatttgagtcccctacatgcaacggtcgagtcaatattcgggtcgtccgtaggcaaccccgcgttcagaaaggcaagtgtcaatattgaatacaataagggaatcttcgaacaggaactacagaaatggtcttctggcgttatcgatacagttttgaatatctaaattccggttcgctgcacacagggcacgcgagcgggatacgaaatgtatttttaagacagacggcggtctcgtatatgccgcggtcttcatcgcgtatttgtcgatgcgaagcccggagccttcttccgtccagaatccttggtctagttgtagtacctttgaccagccccgtggccagcaacattataggctctttcgctgttctggtcgaaccctccgtacgaaccatagccttcagcgccattcgagttgccaccataagcgtagccgtgactgctctgacgctggggtgccggaccactgttgtagccatcatacgcctgcccgtagttgggctgactgtagcgattatccccatatccgctgtatgtttccctctgctgagacatctcgtcgccatcaatcgaggggtggtgggattgtcgatgatccggcatcccagagtcgtacgttcgtagaccatttccggcccccatcgtgtaagcgtcgggcgtcccgttgcggggagtaccgaaagcgccagcttgaaccattgctggagttgtcgagttgatatctgaggggtgcctcttggtggtatcgacctcgataccgtcttcgatccttcgcttgtttcgtcggaaagcataaccgtaggctgtcagagaagaccgtcgtcaattattttgccgatccatacacatcgagtgacactcaccaagattgaagagcaggccgaagaatagcagcaccacaggaagaccaaacatgacgatgaccacgaatccaatgattgtacgtgtgatcgggtcgacgtccatgctcgggatgaaggcgatcatcagtccaaaggcgcacatcctggcgaaagcgaggaaggcgccgagccagtctcccttcttgtccttgtgaggtcggaatccgacgcaagtgaccagaagcaggaattcgaccacgaccagtccgatgacctgtgcccaagggttgccttggccgaaggcgataaagcaagctcgcacgaacgatgccaaggccaaaggtgcaaaccaccagaagtggtacttgggtcggaattgacggtagatcatcccggccgagttgtaccatccatatcgagagtaaagtggcgacgtcgaagagaactcgtggccgtctcggcggtgacgaagaacggccaataccagtacaacggtcaggccgatgacggtccatgcgaaacaaagcgcggcgagcaggatgctcaaccacgaatcatcccgaccgatgttgaattggtaaagggcgaaaatgaaaacgggaaacaagaagataaggcactgtggggtatgggacattgtccattagcttacaacccgcatgcggaaaccgcagagtgtgaggctcaccagcctcatcatgtttccagcgaagaagctccagaagcctcgcctctgttcgccgagccacccacggccttttcggtcgctgctcctaaacctgtcagcgaggaacacgacggcgccccagatgatatgagctccaataacgatagccatggcaatcaagtagacgatgaagatggtatcgaaagcgctcgcgaccggaataccagcagaattagtgaatacgggaatccccatctttacggtggcgattgtgtcttgctccgagactgtaggaatatacgctctcttggcgagattggccgcgacgattgatcggtcgacgggggtggccaaggctgcaaacgagttgaagtctgcggcagtcgaattcgcggtgaagaacgagttgagctgaatagcctcgttataaggcgacatcttccggttgatgtagtcgacagcggcaaacgcggtcgtcggcaacttcccgcctgtcgagtttcgcaggttaaccacggcctcgttgatgttgtcatcgtggaagagtccgagcgcccatgggaaattgagcacaaaattgacgtagttggaagggtagttgatctcaagcaatccagatgctgccgctgcctggaagatgaacaggatgtcgtaccatcgatacacagccgcactaggcgaccatcgtagggtcgagtgaatgagcgcgatgagcagcgcggcgatgacgagtcctcccgaagcccacttgacagcggtctgttgcgtagagagcccgttggacagggtcgcctggagacacgctgcggtctcgccagtctgaacgttttcgagcgagactctagcgaaagcttccagatcggggaccgtccaaaccaatccccagagagagtccgagattttgcctaagtattcgtcgggcacggggtaggtaccgtagcctacgaaagagacaatctcgtcgatcagcctctgagccggcccaacctcgcgcagctgagatgacgcttacccgtaaagttaatagcgggaagaggacacagcacgccttgcaaaaagtcgcacaagttgatggtgaggttgacgatctgtcggccgtatgcgtttgcatatagattgacagccacgttcaggtcatccgacacggcggcggccgagatgaagaaggtcaagctctgcggacaagtggaagattaggaacaccgctacgacctagaaatcgaatggtcgctgacctggttggctttgtgatattcaatgtcaaactcgttgacgaggatactctttgcttctgagcaatatgtcactgaatcggtgtctgttcaaggaaagcaacgcagcgtcgattgataagcttctagcctaggggaatggttcgagtacagagccagctcgtctccctctcgcattgtctacatgcgcgagcgatcgagaaggcacaggaaatgtggttcagaatacgatcgagattaagcacgacttacacagcttgttggccgagatcaacgcatcggctcctcgtacacacaacagacctgccactacgcccccccaaaagttcctcatgaatggtagacgcatttcttgaagaccttgctacgattctatgtcggtcggatctatgtggtgatgctgacgcagtccggatacgggtagaccggggcagccctaggatacgcttgcagtggtccgaaaggccgtgattccgtctatcaagaagacctgttttcgatcctagagatacagtaaatccagagtgatatcgattccacgcgaacaaatgcctggattgaagacgtctcgaattcgaggtggcctacgctcgattatatctggggtgttcgaagaagagaggcggtgctgttaagattcaggacccgtcgtcacgataaactgcgaggggatcgttggcgcgagcgtgtgagcagagcaaagatgccgcaaaagggtcgacgcgtattttgccttgtcgagggcggcggcggtgatccctagataggcagctctttcgcgggttccggaattcctgctcttttggctataagaatagctgcttcgtgcaaagactagcgggacatacggatcgttcaatcagcgttggcaagactttatcgattcaagtatatgatctatgaaaacgttcgcacaaactgctactccaagattgtcgatcgacgtgcgtgcgcatcttttttatggctgatcgctgaccgaccaaatacgccttggaagtccttcggggtggggcgaacgatcgagggaacctgtgtctctggtacggcgagaagggcagaagccgtatcacaaccccccgccgtcggcgccgcgcgagacaacgtgtctcctctctaattcccttctcctgcccctgagacgcggcaacctgatctcgagtatcacaccttcgtcatcgatcctgacgacggaaggagaaccatgcagatatctcggatcaggaccccgtgctgtgtcgcttcgccctcacagactgaaacgccagactcgacatctacgtcacctcgctcggtgaccaccagctcggaggcctttgcacttctttgacaatcgttttgactccccgtctggcgatctggcgatgacttcggcctacgtcgcaagggtgcaaaggagccacgtccgttgcatggccgggaccgagattcggaaccttttctcagctgatatgaccgaagagcgagagtcccgatcaaataacgcataacccgggtcgaaagcgagatatgcgttcttgcgctcaagaacctggatcttgggaatcatcatcaatctcgatccgcgatcagcatcccagtctccttgtcctcatcaaccaggtcatagtcgtctcttttctcgatacagaacagttactccatatcgtcaaatctgagtgatccgcaagtcaaaggcaagaaaacatcacgactcctcggaatgtcttcgaattggctcgcggagcagatatctaacacccttgggttgagtaagacgtcataccggctgagaagcctcatcagtcatgagcactcactgacatatgccgcgttgtcattttaggtgttgaagatgcaagggaacaggtcgtaccctctgtcgaaaatctaagcagtcgaagggaagtcgaagagcatcttcaggtaagtacagcgaaatcaaagtattctctcatcagcggtctgacgaccacctttgaggagcacagggactttgcgggcctgcacccttcattgcgacctatctcgacaggaagtttcctctgaagatgccgcctcccgctgctccctcctcgaagcgcaatgcatcccgcgtagcagggcccacgccttcgcaagcgtttcccaatatcgctaccaaagcaaaaagcaaaaagccgtcaaacgctactagtccaaacgcttcccaccaatctgccaagagcgtaaagagcggaagttctacgcccaagcccgaggatctcgccatggcctttggagggatgcctggacaggtgtatatcaagaatcgcgaggatgatctaggttggggcggaagtgctagcaagaagaagggcagtcgggctggtacgggggcaaacacgcctacaatcctcgtcgacggtgaagatgggacaaccatggatcgaagtcgtagcttggcgggaagcgtccgaggggctggtgccaatggtaacccttcgaccagcttgtcaccctcggggtcgagatcacactcgcccgaccacaagggcaagaaggacaagctcgtcccctctgagcctgagagaccaaagagcagagagatgaaaaagattgaacgcatgatcgagggtgtcaagaagatggccgatgggcaggccgtcgaggcaagcaagatggatggacaggaaggatgtttctgcatgggtgagcgagctttaaatgtcatattccgttgacgcctcgaaactgaacatctcgcatctctagcacggacacatcccttgtcgccgtacacgccagcttgtccacaatgcgggctcattttatgcaacctacaccttccttatcacccttgtcctcattgcaaatccgctctcctcggaccttccggcacgatgcgagtcatcacgaagttgaacgacgagctcggggtggtgctccggcgcgaggaagatgctaaacgcagagcgctcgaggaggagagaatggcctacctcgccgctagcggtgggggcgcgttcccaaccttgaacatgagtgccggaggcgtcgtcaaggagccttctgtcaaggcggaaacgaggagaaaagtgatgacgattggtggagggtcaactggcgcgccgacggcggcccagaagcttaagggaggcagaggtcccggtcgaggcgctcctgccaaggcaaccgtggtgataactcgcacagctagcccacgtcctgaaccagtgtcttcacagcgactcgatcagaccggtgtgcaagacgatgcagagggtgagggaggtggacgagaccgaggcaaaatgcatcgaaccgctcgtccgatcgagaacgattctgaagcgggtatccggcgaaatcgcgaaatgcaagacagaaaacgattcaatcagatgtggcggcaacaagaggagcgtcgattcggagatcgtgttgccgtgctccaaggttgggatgctcaatacgagcctatcaccaaggaggagagggacgagctcgaagcgattcgccgagggaaagatgccgaacccgtcaacagggaaaaggccgctgttcctggagccgagatcaaggccaaacccaaaacgaagagcaggagcaagggcaagggcaaggaaaatgatgcgggcaagatctgatgggcagtattgtttagagccagagagggccataatgaccatatcatcatgcagagtcctattttgcgcggcaagtctgtggtcagcgacgtccgcgtcatagctacaatcgaccggtgtgtgctgttctgatgtagaagtgatagatcatatatgccatgtccatgcgatcacaatcaagctttagacctagatcattagctttagatattctttgagattcaagagaccgagagccatgcccgtgagtccatggagggcgcatcgtctcactacacacgaagtgtcaagccaacctatgccgcgtcatgtctaggcctaccattcatcctacaacgacgagccaacacagctcgtcggcaacgtcggactcttgccattcagctccagagtcagaggtcctgctcctatccctcgtatgtccagaatcttgcataaatagctacgttcgatagctgaccgcgacttgcatgtttgaagaggatccttcgagacccgatatcatcgaagagagcttggacttgtgagtcgcttctctgcagatcgaggggatttgccgtttgaaacctgaccgtgttggtgaaattacaggttccgtgccaattgcttattccgcaacttcgagattcagggagccgccgaccgcaccctcatctacctgattctcttcacccacgactgtctgacgcgagtggcaccgagtcctggtcgaccctcgcctgcctatcctgaagccaccaaggtccttcagaccctcgcagtcgaccactttgctgtaccgggcgaggctggattcccccttaacagcttgtacaagggcccttcgagcaaatcggagactggtgagttacccctctgcaaaatgcctctcagccacccaatcgctagtcatgctcacgtagtcgctacacatttcgtttgcagatgctctccgatcatacctccttcaagctaggcaagagctcgccgctcgcctgtgcgacaggatctaccccgtcgagcctgagactcaaccagacggtacgccgacgcctgcggaaaggcaaggtcagcgggtcaccaagcctagcaagtggtggatgagcttccagaagagaaagtaagtcgacttcggagcgtgtctgatgataggcaccttgtctgacaagctgcgctctgttaggttcatgggccgaagcttgtcttagagttccgagcaggccaagaattgccattccccatccggtcatattacgggttgtacgtaaaaagcgatcatatcagaccatgtttgtatactgtgtcgccaggttcgtggtcaaacaataccatagcgctcggcgcacatgctgtgatatccgggtcacttgaagccacgtcctcctcgttccgtcaagctttcaacattgcacagtcccagcatttcgtctacaaggccggagtattgggacgaggcgcgatgtctcattgtcgatggtcaaatccgaatcctaaagcgattgcggatcttatcgattctcaatacgcgttcttttctgctaaagaatcacgcagcagatgtaatcaacagtaccaacgaaggagacagtacccgaaatatcagttccggcgtgtggtcgccgagccagaaataccgaagaagtgatctcgcggacccccaagctggtagctgagcgccatgggaacttttgaacaaatcgttcgaaggagcacgagaacgattggtacgacttcgaggcgtcccttccaggatattttacggcggaattgtttgtgccgggtctgttatacgagcggttcctgtcctcacggagggtctgcttgtcaagttcacgcaccttcggataaacgataagataaagacactctgacccccggtccttactgcatccgatcgcttccggattgtagcaggtcgtcatcgttccacattttcttcgttctctcacgagtggaacgcacaccttccgtcatgtaatgtaagactattaattaagcatgttcatatgagtatgtccttaggtcgacaatattcccgatccgttcgtttggcctcgcaattgctatatatcgtaaggttcaaggagattgccattgaatcaatatccttgtgatacgaccccataggcggctatcattcgtcgtcctcttcgtccatcttctcttgtgccataagagcctgattgattgacgtcgagatgatcagcccaaatcatgctttcgaccgcagaggctcgatgtctcatactcacctgagccaacttcatggcctcggcctcgccaccataatgacccgctcgtttcttcttgaaatccttgtcttcgacatcctcgtcctcttcttcgacctcctcgcccatcccgtcgtttacctgccccgtaggaccgccgggtgagacaatcttcctcaatttgcccgacccggacttctcctctggaagagaaaacgaagccgacctgcttgtcggtgtggaagacgtcctcccggggcgaccgggcgtcatgggagattcgggagccatgggcgaatgaggtttgacggggacgttatgtccgttcgggttgttggtcgtggcgttgatgatgttctcggcgatgggcgttcccgaggtcgaatccaccgtctcggagaaagggaacccaggcgtacgtcgattccctgcgtttcgctgagtgttctgtgcaacgagttcttgctcggttcgtctggtcggtcgggagtcgagcgtgacgtcagcagtttagataacggtcggttgatcgacaccgctgtatcattcacctcctcgccccagggctagcttgcgagcccatactagctcttcgctctgacgtaggagagctcaattcaaaatcaggaacctctgtgatgcgcaagtcagaccgtacaaaggcatgtcagccgatgttcgttagcgtcgactcgcctctcttaagacttaccgagatcggggaaagactggtcgctggagacgaatggagtctttggctcgtcgatcttcctatcgataagaatacgttccgcatcagctgcaacgcaggagcgctcgtgaagtcgcaattaacgacgaaactgaaacctacatcttggaatccttgttgatctcgttcagattgatattctgttcatcccaagtcaagctgcaggagatgcagtccatcagcatcttgttcgcttatctttgacataagcgatccgataggcggatatacactcactggtcaccctgttgcctctcgatcgccgatccagcttcttcgcctgcgttttgaggcacgccgtaagagctcgattgagcattctttaggatacctcgggctgtaagtggagacgtccagtacatcagccatcgtatcgatagctctggggcaccgactcgagcccacgtttgaagtccgggtcgatattggcgggactatgtctacccggagcaattccctggacccgagcttcggtatcgttctggtccgaagaggcaggaatgtcgatgtgcgatgggcgttgcgacgacatggtgagagatgggtaataaagtcgatttggtttgacggtgtgaattctgacgagagcgtttgtctgactgatagacgtgcacgagatgtatcgacgtcgtcgttgataattgataacgtatgtattccggtactacattccccctttcgtgagcctttgacatcatactcttgatggtcatatggtaatcagctacttgcttagcttgatcgttcggtttcgtcatacagctggtaggggaggcaggatgcggaagcaaagttacgtaagaatcacggcattaacggtattgacggaagcaaaatatattcccgaccgaggttcccgggtcagagagatttatcgcaaaggttcaatacagattcaataatggtcgtacaagtaatttataagaaggtaggcaactttcaaactagtcatacacaactcgtacttagcatcttgcatcgtcgcagtcctgtatccctagtacgaacctctaggatgtcggagtacgacggctcggatgccatctcgggcgtcaagcggaaacgaataacgttcaacgacgaggaagatgtcgcacctacccctccacccgtcgctgctccgggagtggggtacatgaacccagaacgactcgcagctctacaatgcgaccctggctcggcgatcaagccgaaaaaggtgaaaaaggaaaagacggtggccaagcagcgatacctgaagaaaaagatgcagaaacggaaaaagaggctcaaggccgccaaggactcggcaccgaagagcaagcatggcgcagacgggatggaagtggatgaagagagcgacagcgatgacagcagtgatagcgacgacgatgagggcgatgacgaaccggacgaggtcgagaacagtatcgtcaaacccaagatcatcaacgcccttcccacaccgaccacctcggcttatcctgccgttgtcaaacctacaatgaagaagacggctgctccagcacctgttccggctagtgtcacaacaaattctacctctaaagaatcggacgaaaccgcagaagcgtctattcctctcgaaaacgagacggtcgaacaacgtcgagagcgtcgtcgattagagaaaaaggccaaacgtgaagagcgacgggcggaagaagctcgattggccgagaaggagaaggagaggttgagactcgtagctatcaaggaaaaggagaagagagagagaaaggaagcagcccagaaggctgctgctgccaggaagcagggtgaggacgtcgatatggaatcggctgaatcctcgagcagcgaatcagagtcggacgaaggatctacttcctcctcctcgagttccgcgtccggatcagagagcgatgcctctgcttcttctgcgtcgtcgaagcgatcgaaaacgtccatcaacccggacgggatcccctctttccccttgccacaaggtccggcaaaaccgtctcagaccctgctttcccggcaaggtctcccgtccgctctaagggacgctgtattggtacaagaagacgacaaggtcaagatcgacgatatcgagctcctcgtacggcgaaaacgaagagtagaagacacggaacctgccgagggtgaacgactgggagatcggatcaaggacaggttgcggcacctgggaattgaagaatttttcgccgtccagacggcactcatccctcaattagcgtcattgccgctcgtaccctttgcaggggagatcttgaacgatttcttagtctcggcgcctacaggaagcggaaagacgttggcgtacggtgtgcccgttgtcgaagtgagcgtcgagttgtccgctatatgaggacgatcagagtaggctgacgttgcgaatcgcatgagtaggtgctgagtcgacggatagtgacgaggctgagggcgttgatcattctgccgacgcgggacctggtcatgcaagtgagagagacgatggaggaattggcgcggggaagcgggctcaaggtgcgttcaatgcgaatgtcaaccgctagtccggattctttggctcacgcagttaacaaccccgatagatcggtaccgcaaccgggcagcattcgttctcgcaagaacaggccgcactggtcggaaataccaaggacaagtgagcgagacagccccatgtcaagcgcgacgatccctaaccgttgcttcacattacaggctactgggtggctcttccaaagtagacatcctcgtcgccacacctggaaggctgatggaccacttgagagatacaccaaacttttcgctacaacatcttcgattcttggtgagtaagtatgcgatatctatcatttagcatttcgagcttataggtcattgtttgcttcacgaatcagatcattgatgaagccgatcgactgttaacgcaatcgttccaggactggctgaaccaagtattagcgcacttgaagccgacggaaaaggtcgacatgcgggacatgtcacccgaagctcggatctcgaaagggcacgatgcagtagcacctagttggtacgacgatcttggactaggacaaggcgattgggagggcaagagacacctgaagaactcggtaagtcctctccttgggagaagcagaatcaaatcctcatcgcttcctcatccacgttcattcagtgccaaaagctgctattttcggccacactgacgcgggacccgggcaagatcgcggcattgcacttgacgaatcccaagtacttcatcgtaggatcaggcaagactgacgccatcgaagcttccgcggatgccactggtcaacaattcgcgatcccttcttccctgaccgtaagttgcgaatctgaacgctgcgagcattgatcgaatgcagactgctgatacccggctttttgctgaatgcttaggaacgaatgatcgttctaccgcccgacctaaagcccttgaacctgctgcacctcctgcacactccttctttccagatcacgtccgcgctctgcttcaccaaatcggtagactcgaccgaacgattactacgccttattgctttctttgaggatgcctatactgccgggaaaaggatcgtcgcgaaagcatattcgggagagctcgatacgagcgtgcggcgaaagcttttgacagagtttgcgaagggagagattgatctgtaagtgaccatctcgatctggtaagaaattggtatcagcttacgaaatggcccatcaacacacagcttgatatgttcagatttgatcgctcgaggtatcgatctgcccagtgtgtcacacgtcatttcgtatgacgccccagtggacatgcggaaatacgtccaccgagttggtcgtacagcacgagctggaaaggagggcaccgcctggaccttggtagagaagcaagaggtgagactgctttgccgcgccccccgatacagaaaccaaattgacaaagtcgatttcaatccaggcgcgacatttcaagcaaatgctttcccaggcaaaccatctcgagcgggtcaagaagatcaaggtcaaggagacggacctatcggcactgcgcgatagttatgacgtaagttgattcgtgttgtgtccgctcgctttacagtgattgacccggtgtggaaccagattgccctgacaagactgaaggccgtgtacgcgaagggacagtagctccaggttgtatgagagctatgggtatctaaatatcatatacgcttgctttcgatgtatcgatgcttttgagactgctgtatcgtgcgcggctctatctgacacttatcgtccaacctagaagtctccaggaaataacgattactcgagatgttgagctaggtcacgttatagtctcatcacggacatgcgcctgacatataaaatcggtcacgatgcctcgatgtcgaccttgatctcgtattcggcttgcctcgaccgtactcctgctagatttacatcgtgcatcgcacagtctgcaagctaaaccccggtcacaccgcatgaactaacgtccgagatcatcatcgacggttcgtcaggatcgctgcgtagagagaaaacgctcggacatatggcgcgacgcaagaaggactacgcttcggattactcttcggattccgacgccgacggctcggacggctacgacgagcaccgcgatgaaggccctgacgagcgagcggagagggagctctttgaacagcgctctggtcgaaaaaagaggagattgaacaggggagatgggaaagccagtgcctgggaggggatatttggcgaggacgatgaagattcgggacgcttcgagcaacgaaaaggcaagcgaaatgcagccttcaagtaagtctacacctttccatatcgatgggcatggtaacctttactgatctagtcgtcccttgcatactatccgttccttagagctcctacttttgtagccaaaactgaaccccaagccagctcatccaagcagccgcaagaacagctcgagccgtcagacgacgaaggttccgctgcatctaacacctcgtccgacaatgacgagccgcaggctctggaggaggagacgaatgagaagggtccggtacggactagagaaaattcgtattcggacgacgaaccgcaaggtggtgctggtctgggcatgggctcggcgagagccgccggaccgtccgctatgcttactcgaggtggtttcggaggtataggaagcacaagaggaagaggtggtagcggcggaattggtatagggtcagcaaggcctggtggtgctacatcaacaggcggtagacctattacaatgtccagctttgccaaatcttcgggcacggaaaaggagcaaatcaaagcgaacgaggtgaataaggaggagccgacggtagacccccgccctgagccgattagtcgagcttcaaacgataatctaggaggaatcggaacggcaaaacgacatcaaatcgaagaagccgaagaagaggcgttatatccaagcgatccggcccacgcgatgccccaatcttttggtcgagaccgcacagtgacgccgcagcgtgtacgccctgctagacaacaacaggctttccgaaccgaagccgaaccagaggcatcatcgtcaaaaccgaagtttagcgtacctgtcaaagatctcaatcacttgcggtcgatagccggatcgttcggagcccgtatgctggccaagcaaggttgggctcccggaaagggtcttggtcgggacgaggatggaaaagccgtcccgatcgaagccaatgtaggtttggctcgaggtcaaggtatcggcaagggagtccgaaccgagcagagccgacgtgaagccaaggaacgtggcgaggtcctggacgccagcagtgacgaagaacgtgaaaagagacggaaaaaaaaggaaaagaagaaggaagcaactcctggcaagggggccaaagcagagtggaaacgagagaaaaaggtcaaagtcaaagtagagcacaagacttatgacgagctggtggccgaagcggcggcaggaggtgccgctggtgcaaccggcatcggtctggtccttgacgccaggagcggagagctcaaagaagtatcttcgctggccgaactgtcgctctcggcgcgggcagccaccgagtggacgccgaccggtgaaaaaatgcaactccccgagctgcggcataatctccgtctcattttagaatcgacaaaaggcgatgtccaagcgctcgtcaaggaaggccaggcggtccgtatgaaacgcgaatgggcaaaacgggagaccttgcgtctgaagaaggaagatgaacatgaggctgaaaaggctcaacgcctcgaagaaatccaaggggtcgtacaggagatcgctaccaagctagaggctgttgatcaacaggcaaagaatcccttgcactcgttggaatccgagttgaacaggttgattgatcattttacgaacgagtacgaagagtatgacctcgacgaggtgatgataggagcgatgacccgcgcagtgagtaatcattacccgcgttctcgctgagaatctactaaaacctgataatcttctgcagctaagcagcgtcttccgcgattggcagccattggcggagtcggatgcattgctgggaatcttgcgtccttggcgaagagcgttccgatattcggatccagactctgtgaacgaagatgccgtgtacatgcaggtctatggaagtgtcgagagtggggaccgcaaatctcgcagcaggtgagcaaagcgaggtacatagttaccgttccttttgctgaaccatgttcctccagtgtcatgacgccgtatgaagccatgttggacaagttctggctaccgcgagttcgatcagctctgaagtaaggacacatcgcctgtggccacgctatcatccgctgacttgtctatcttgccgatacagcaacgactgggacgtccttgacccccaacccgctgttcgactgctggaatcatggtcgccactactaccgcgtttcatgcgagacaacgttttgaatcagctcatattgcccaaaatctcgtctcaagtgggagagtggaacccaagaaggcagcgacctggctcagaatattcgctggcttccatcgtattcccgtggctttccgttctccaagaccggtttgatgggatattggatgaggccaaggtcaggataagcgagacaatgaagcgttggtccgtaaaggaatcgatacctgacgaatggaaactgtggaaagatgtaagtctgagcgagattgggaaagagtatcactagaagcagtctaacgtctcccataccaggtcttctcgaagggcaaatgggacactctgatgctgatgaatatcgtgcccaaactggccgcgcatattgacagcgattttgaggtaaatcctttggaccagaaaatggagcctctgaaccgcgtgttacgatggagcggtctactacgtgattccacgttcgcccaaatcatcgaagagaaattcttcccgacatggctcgatacactacacttctggttgattcagcccaattacagtgcaggagaggttgcctcttggttagtgacggacgtctcgatgcgaggagcacaggacatcgaattgatccaaagatttctgattacaggtatcatttctggaaggaacactttgcgaactactcgacttcgaagggcgacaagttgaccgaaagcaaaggtatcgaccacggcttccgtgccggactgagcctgatgaatgacgctatgacgctcggggccagcgcaccaacacgtttggtcaagccaacatttactcctttgccggataagaaatcgtctagcaaacagtctctgcggagccgcaacgcagcctttgcacagccaacagatagcgaagtcacatttaggtcaatcgcggagcaatacgctgccgaccggaaccttctcttcatccccacgggacgatcccataccacgaccggcaagcagctgttcaaagttgctcgaggtttggatgcacgcggcgttacggtttacgtcggcgacgatgcagtgtatgcgcaagtgcaagacggcactttccgagccgtgctactggacgacatgatcaagatggcatctgcatgaggtcaattatataccgcctagcatgtaccatatcttcacaaataatgcagcattttgtccattaaggcgctcgcacccgcttacaatttgctagaagtgcgcgatcctcctctttcgaggctgcggcgaccttttgcgttatactttctgccaccgccaggagctttgtcgacaaccgcttgggcgaggcggcgaacttggccaatagcttgcagacccgcaaccgaaagtgggaaagagctggatctgacccaacctttcgatgtatgtgctgaaagacgtgaggctcctgactgtgacctaggtacagagcgataaacgtcttctccccggagggcacaaggcacaactcttcccacgcggccatcaatgttggagcaagtccgatgctgtgaatggcttgtcgaacgcagcgagcagagtcgaggctcgattggcgtagctgaaccctcagcaacgtttcccaatcctcagatgatttcatgactgtatcgtgccattacgaggtcagctcaacagcacaaggcatagcccacaaaatgtagctcgtacccggatcacttatggatgtttgtgctaggcgaagctttccgatcagctttgtagtatcgatatcggagctttcgagcactagttctaagccgttgcccttttcgaataaggaaaggcttctctggcaatttgcttccacggtagattcaggcaactcctctgaaccaagtagaagctgcaggacatccagatagatcgcggcgaagacgctgtaaattgaatgtcaatcaactcggcagtcctgccgtgtctgattcacgtcgcactcacccctgccgctggatttccgcgcaaagccagtcgatgatgcccgcttgacaccaacttaatagcggctgagaaaaatagctgagcccgctgtgtagcgtttcgatatcaatgacctgagagatagcagccgaaatagcctgagagactaaggtcgttgcgaggcgaagaagcatttgcggctgagtagatctttcgaatcgcacaaaagtatgagcagtcgttgagataagctgctgtatcagtaaacctactgtagcaaatcatcgctgatcccggtggttccgaactgaaacatcccctcagccatggcttagcctccgtgctactttccgtaatgactcacgatggcttgaatccaacctttcaaccaaaggtcctcttctgaagataattcgttcaccaaatacacccgcgatgcggatttaagggaaatcggcaatgatatctgaggctatctatcagtaatttggttcatggagccaatatagccaccgtactgacattgtacttgaagcagatcgttgaggcgaggaagaccagagctccatagttcgtaatggtcgtttgtgggtcaccttaggacctttccgtcagcgtccttgcgccccgacatcccaaattcgatagccattacccactctgaatcgccaaatttatctgatctgatgacatagcatcgttgatgtgattcagcgtggccgaaggcgtggcgtgtaggcagaccagctgtagcaatacgaagttctcgctcaatgcggtcactactggcgaagcagaatcccagaaagtctccaggaactggagtgtaaagcgcacgatgtcagtagaaaaggtctgagcgaaatgaagagggcgtactctgcaaatggtgctggcaaggccgtcccagattgaaggctgtgtcaacgtgtcatagaccagtcgcgaatcgggcggtcccgtgagcatcatgtaccgttcctatgatcgaaacgacgcaataagtataaaaaaatcagagcgtaacacctgtggaactgcgcaccatgatctcgtcgacatctcggtcattacttgtggtgatcaacgtttggtcgatcttgcccaggccatgatggcgaagctccgggccggtgataagtgaccatttttgcatcgtagagcagactatgtcgatagtagatctgtatgcgacgtatcgaatcaacactacagctcgtggctttgaaagcaatagacctacgcttctctactgccgccagtgcgattgccgatcaggaatgaatccaactcgtccaattgaactcgatatcgatcgttgatcaaattgagcgattgggcgactgtcgactatcatacacatgagttctgcgaataagggaacgaagtgggatggacgacctacgggatatctccaatcttgatgccaatcggcgtcctcccttccctctgcactagaccattgccagtaaccgagacttgcagccagaccgtggaacagccaggtaatctcgttccaaccaacttttacaatcctcgctgctatgcgatcgcgttcggatggctccgtgccagttgacaagtccgccatgatctgatcctcgggcttgacggatgactgcaagtcaggttttgcgccttgacgcagatcctgcaaggaagaaaacactgcttcgaaggaggcttgtagcaggaaatgtgcaaaagtcgacggattggttgtcaagattggaccgagatggatcaaatcccggtaggcaatcggtacattcgtaaggtctggcccctgatcgtcgactcgcttgcttggtatcgtctctggacgtctagagctttgccatgtccatgtctgctctagagcattctgaagagcacaggtaatgtagataggcgtcttgatatgtgtataagctctgcccgtgctcgagccattggtgggcgcacttgccaatgggtctggcgtgtcagatcggaaatcgcttgagctctcaccgccgattgccatctggacgtcctctggttcctgcgccgttccttgttcccccgcaatcgcccgcagagactgcagtacgacgtccgagattcctgatgcctgaccgctaatctccgacaggacggtatgcgctgcccgttgaagcctcatcgaatcccccaccgtcaccttttgcagggattcgatcacgtcaacgactagtctagccccgtgatcaccttggcccaacgttacgcatcgacgaagcagtgcaaggtgatcgtcgccattgttcttctggctgtcgattcgagctggacgtgaagcaatgccgttgtgtattgccgatttggcgtccttatgctctaagacatagaatgcaaccgagtctatggttttcgctttgtagaccgtagaggaataaagcatgtagctcatgagcgagaggaccgggatttgcggagactgcagtactgtccgcaggtatcctagaggaacggcagagagcccctgatacttttcagtggtctgaagcagagcatctatccatgtcgctcgcttgtcagtttagctagttgacatttattcgtcagatacgtaccccagagctgttcgtggaggatagccaagtcatcgttcgccgccaatcgcttctcgataagcctgctggcgtattcgaaccactgctcggacaaactcggttggtcgtctgacggtttacatgacggtatagatctcacctgtgcagaatctaaaccggaagccagtgcggactcgatcagctgctggaaaggcatccttccaaagtcttcaggtcagctcttggattcgggtgtttatctaggtgtagcttgtgcgtataggtaagactgaagctatagatcaaccgatcagaatcgagatatgcgggtgacgaatgaattggctcggggactctctgggattagagcagaagttgaatcgaagtggaggcaactcccgtgatctgaggatatctggtcccggatcaagtgttaagtcaagcgatatcgagcgcttcgatatgattatagtcctacaaaggtttgaatggcaatctgctctctgtacaatcgtcaaattctttcacacatctaataggaaacccaaaagcactgctggtcgttatttgaaagatcccgtccgagctcccgctagagacccgcctgggagaccttttccggcatctgttgtcgcagaacctggaggagctggtcgagacgagacttggtctcgatcgagatctcgccggtcctcgaggggtcaagcacgtatgcaaagacggaaaggaggtggtcgatgtgaggcagcacgaactgagactggttctcgaagaggtagaagattgctcggaaagcaggcttgttctcgatcgggtcgttcttcaagggaagaccgccgaagaagattggcagaacctgaggaaggaagatcgggtcaacagccgttctacgattcaacatgatcgatctgatactcacagcatccagaggcatagcagtggggctcctgacgatcatcctggcgacacacccgacagcattgtccttggcgttgagctgatccttgggggtgtcggcagtgacattgaagtacccgtgcagaacctgcatcagggcggtaaactgcgagctgaggtcgaggtcggaccactcgatcaaagcaccagcagcaaaggccgcattcgacctgacctcagcttcagagtcctgcagagcctttgacagcaaagcgaggatgttctgagtgaagggggtaatgccgcccttgaggccgacaatgatctcgcccaaagttccgacgaccatcgatcgctcattggtagcacgctcaggactctgtatgggacgtcaaggataagcgccagcaagcagtgcaaacgtgatagaataacgtacgtagtacttggtgatcaaggggaagaagttgccaaactcctcggcaaaggcagggccgtaagccgaagccatggcggacagaacctcgaccgagttgctgataacgacggcctcgtactcggaagtctcgaggtcggcaaagtcctcgagtccgccggtctgctggcactcatgtcgctgttcgaggatagcacggacgtgactgaggatagcctcgcgacctggtatatgtacacgctgatgaggatttgcgtctcgtaaacatgaatgggatactactcacgaccttcaaccaaagcgggaccgcatgtgccgatgcactcggccaaagcggagcacaacaagatgttgacctgcctacaaaccgcccaagtcaaaagacatcagcagatgctattgagaatgataatggtatggttcccgcgcgcaaggagggggtagattcgttcagaaaacatattgcgttgtgttaggagtttcatctcatgtgcgtgtagcatcgaggtgagctgagttatgttgtcatcattcgtcacggggacgggccggaggggcaaggggagagatcgcgggaacacaaacagtggagggaggcggaaggatacgtactgatcgtcttcggtctcccacatttccatgatggcggggaagatcatgtcaacgagctgtgccacctgattgtggaagggaacgatttggttctgagaaatggcacggatcttatcagcacctgcttgacattatccattctgtgctgtcaatactcacgccctcttgccagtcgaccgggtcagacatctcgtaaaacgtcttgatcgtggtgaacaaggcattaacggcggccttcctgattccctcgtagtagtgcatcaatagacggagcaaagcctggatagatccgtccaagaagggcaagaacgcctctcgtgtagcctcgaagatttgaccgagcacttcggcagagatttccttttcgatggcaacctcgctgttgatgttcatcaatccgtcaatgtcctcgaactcgtcatcgtcctcgctctcgtcgccattgtcaagcgagacactgccggaagcggtcccagtgttgaaagcagcgatggcctgctgaacggtagcctggtcggtcttgccctcagagtcgttgaattggtcggcctcgctctgcttgcagctctcgatgagtgcggggacggtctgagcgaggtaaggggcaaactcctcctcaaagacaccggccatcgttccaaagaacatcaaggcgctttccttcatcctggcgctctcggactgaagcccgttgatggcgtactgcatcaagtcgctcaagtggggtcggaagacctcgcggccgacgacctcggcaaatgttcccagggtgtcgatagcgacacctcgcaaggtcgactcttcaccttcaccctgaaggagcaaaaaggggacgattcgcttggtcgtctcgaggaagtagggctggaatccctccttggaagcgaaagcggccgagccgatagcaccggtgacggtgatcttgacggggataggagccgtgtcgagcaagccaacaaacttttccatcaacagggtcaagtagctggcgatgttgtcacccaaaatctcgaggtaggcctcgagcgcggcggtggcagccttttgcgtgttggggtcctcgacgagggcaaagagggcggggacgaggtgttcgtgcctgtcggcgcactcctcctgcaaccactcgcacatgcaagcgagagcgatacacccagcctttcgaacggtaggttgagcatcggtcaaaccgctgtcgatcaagggccagagctggttgacgtgcggtcggataaactcgctgcaaccttcgacggtgactccgaaagccatcagggcggactttcgcatggcagggttttccgaagccatgtaggtctgcaactgagcggacaggacagggaagacctgctggggcgggagagccttggcaagctcgtcgagcgttcggaaggccaacttggacgggtagtcgtcgtcgtcgtcatcgtgatcctcctcgcaaccgatgggcaagagacgttcaatgataacaccggcgagacccaaggactggaccttgccctttttgctacaagcgagagcgcaagggatcgaatcagtgtcgggtcgggctttcgagcggtccaccactgaagcacttactactggatggtccagctcaagctgttgagcgccgcgttcctaatgtcctcctcggcgtccgacttgccagcgatggcaagacagatctcgacgtactctttcaagttcttcgagatcaagggagtctcgaggatgagacacgtctcgaacacgtcgaatgcctgtttggcaccctctacctcatcggcaacaaggatttgttgcaagacctgcaacatgtggggcatgagagcttggtattgtttctgccaaggcaagaccaggtatatgggttagcatggcttcagggtcaaaggcggaaagtcggggtatcatcgactcacgaccaaatccttctgatcgctctcgatgtactctgcaatcttgccgagcgctcgaagggtgatcaacctgacatcaccgtcctggtcggccaacgtggttccaaagatctggaacatgccggtcatcatgtcgttgataaagttgtccctgaccgtgtccaagacggtgtagaggacaaagatggcggcctctcggtgagtggcattggcagattgacacgtctgggtgaggaacgggatgaggtccggccactggttggaagagggggtggtcgacgacgaaggcgcgccggaaggcgtgtacaggtcgtgatcggcgatggcagcgatggcacgtgcgattccgtgtcgaacgatcttgctggaagagggcaagggacgatcagcttctaggtcgggaacgaggacgatgacactgatgctcacgtctcttcggacagtaatcggtcgagcagacccgacttgatcctctgcctgaattcggcagggatagactcccatagcttaaagtctttgctaaagactcgcttcctcaactcggtagcggcgagttgcctgacctatcgatcatcgtacgaacggatcaaggtcagtggggtgtcttcgcagatcaaggatgcgaaaaatctctcgactcacaccctggttgggagacgaagcggcggcttcgtacaaggcggggatgcattcggcgctcttatagtatttagtgttgagctcggcagtggctgccttgatctggttagtgtccggagacaaaatggcctcgaggcactggtgaatgccttggatgaatgcgggctgagaatgtgggaagaagattcgggtagggtcagtcggcgaacccatgatgaagagtcggaattgactgggcacgaagtctacttacatccatgatgaaacgtggtcgtggtcgtggatagaggtcgtgaatgtattacaaatccgacacgacaaaagaagtggttttggtctttcctttttcttttgggtgagggagtggctctcttgttcggtcgtctctcttacagacagagacaactagtcgttacagtcaaagagcgtggttagacctgaagtggaagaggtcagagatgttggttttgttttgggagggggatggcagggaaaaagaaagagagagtagtgtgagtaagaagcacagaaacttttgatgagatgggtggggggacccacccgtctccctaaccgtcctcatacccctccccttgtgccccgcagtcgaagtacgtctcaacccccatcaacgactccagacacctcaaatccgagggatcgtccgatcctacattaccgaaaactttgaacgggcggaaccgggcgccgaggtggaaggatgggaagaggtcgacgttttgaaaggatgtgccgagaggattgtgtttgccgagagcagtgagtggtcgtcttacagagtcggagtcggatattggatactggaaaggagaggggagggaatcgccggagctgacggatcgttttgactgtacgaatctcatttacccttttcccctcctcgtccccgtgaatcaacgcgcacttggctggcggatgggtgatgtacagccctgccggatccgttcccgctcttgaccgatgtcaagctcgtcatccacgtctatcaaccgtcgaatcattccggcctgcaagagtttgccgcgacgacagggggtgggtcatctcgtcaccgacgtagaccgtcgtcgtgctgaacttgagatcgatataccgcttgtttcgtgcgattggtagaggaggacgatgacgaggacaatgtcatggcggcgacggtacaggaattaccatcgcgctcgttggacggtctatgggagaggtcagtcccccgtgcaagcgatcgaccctgtagacgaatctctgacggacccatccctcgacccagcctgatctacacggaagacatcaaaccccgtctgctcaactacatctacaccaccctcttgttctcggacgccgatgtcgatttcaatatcatcacctggaaccgggtcgtcctcttgcacggacctccagggacgggcaagacgtccctctgccgtgcgctcgctcagaaactcgccatcaggctgtccgagcgatacgcacgcggtaggttggtcgagatcaattcgcacagcttgttctcaaaatggttctccgagtcggggaaattggtgcaaaagctgtttgccagggtcaacgagatggtagaggatgagagcgggttcgtagtcgtcctgatcggtgagtcttccagcgtgggcagacggacgattacggcgcgagagaggcgcatcgattgaccgtctctttgcgttgccgtccgtagacgaggtggagagtctgacagcggcccgagcgggggccatgagcgggaccgagccttcagatgcactgcgcgtgagttcttcaaacgtggcgcgtccggggtcgtaatcgactgtttgattgacccgaggcgccatctccccgactctcgacctcctaggtggtcaacgcgctcttgacccagttggacaagctgaaacatcggaaaaacgtcttggtcatgtctacctctaacatcgcccaagccatcggtacatctccgttcgagctccatccggccttttccatgagtttactcactgacctaagctcgcctggcgccctcgcagactcggcgtttgtcgatagagcggatatcaagcagtatatcggtctcccaccgcccgaggcgaaccattggattttgaccggatgtttgaacgagatgatgcgccgggggttgatgcagcagatcgtacgtggtcgtcgaggcttgttccgcaagcgatcatagcctgtattgaccgacgtctaacgggggattgacggcggcagaacctgctggactggaagacgtgcgaaaaggttcaggaaaagccggccaagcaggccaacctggaacgagtgagacaggcgagtctccgactggccaggatctccgaggggtgtcaggtgagtccgggctggggttcaaggtatagttggcagtcctgcacggctgagatatcgatccccctcgatcgctttggcagggcatgtctggacgaacgctgcgtcgactacccgtcctctcgtacgcacggtacatggtctccctctcgctcgaacacccagcgttcgacggggacgacgatcggcccgatcgggctggtttcgccgtggaagattggttggatgcactcgaacgggtcgtcaaggatgaaggggcacaaaaggaagcgttggaaagattggtcggcaccgggggcgtgtgagggctagaacgcggacgcggttctataatgatgacgaggcatgatatcataatgacacgtaacgatggagatctaggtggtgtgcttgtaatatacaaaacaggaacaaatgtcgtcggcgatgagcatggcgaggtatcaagcaggtggtgcagtaggaggaggaaccgagcgctttgcagactcccggctggtgaccaagttggtcaatgggaagagcccgcgtgagacccgacgatcatgtccgtcgttgagtcaacttcttttgagccttttcgagggcctgggcgttgcgttcgtctcggttggcgatatggtccgccttggccgcgtcgatccgttctagtgtcaggctgtccaggcgagggttttgcgaatatcgatcgtcagcggatccgaagtggtacaagctcggccggaggacttgaatgacgcagtatagactaggagggtcgaaaaggggctgcaattcgaaaagggagcttactagtctttcatacattgacgcatcgtgttgtattgtccgccacagttccagaggaccgtcaccgtctttcccctagcgcaatcagcgaaatctgcagcgacgagccggcaacccatgtaaagcggttttaatcagagcatacgtggtatgatgggcatggagatcagccccggttacgaccaggtcgatcgagggggaggggacggacctttgacgagcgcctcgcagtgtttcaaggactgttccttggctcgatcgagcacatcctgttcctctcttcttgataatgtgatcatcctgcagagtctcaatccagtggcggcggagaggtgttgaaatcgagattgaattgttgtagatcggatgaggtatcggtcgcatgcatgaactaattgagaacgctcgatcttgaagtgctctctctctctctgcgttgcccgaactttggctaagtgatgatgaaaacgcatagatgtccagtgccgtaatatgcgttctggctgtcttcggaagctaaattggtcaaattgattccgataggagacgagcgaagtgacgatatgtcgaatgcacagcagcctaaccttgatgaattggtactcggatatctgaaaagcaaccagtagccagctaccaaatagccaccgtagacaacatcaaagcgctacattagactcaagataactataactatagcttgacgacacatcgatatgagcgagatggacaccaagatgaccgagctcaaggtaagcttcacccccggatgactagctccactcgctgcgccgagacccttgctccggcttgatccgctaacgatcatgcggccctcaggccaagatgccagcgaccgatatcgatgacgggacgctccgccacatgctcgaacaggcggatggtagcgtcgaggaagcgctccgacagatcaggcagatgacaggggatgaggaattggaggatacaggttacaagctggacggcgggtcgagtgacgtgagtccattcgcaagttggaacaactgaacgggtcggattgatatagtttcgaccgatctgataggtcaagaaggaagctctcgaggctaaccgagcgggttcgatcactccgaccatgtcgacccatatcacttccccgcctcccgctgtctcggctgccattgctcccccgactacaattgctcctccccccatctcgaacgagacgaacacagacccgcagctctccgagctcaaggtcggtcaacggtctgcgtacactcgttgtcccacaaactatgggcctgactttcctgtcctgtcctcccacttaggccatgtttcctacggtcgagaacgtcgtgatcgaagccgtcctcgagactcacgccagtagaccgcaagacgagaggttcgaaaaggctctgggagacttgctccagctcacggacccggattacaaggtgagcacgactcggccggtcgatattcaagggttccaccgcttactgacagccctcgtgccgtgttgaaagccggatcccgtcgctgcggccccttctgcctcccaaccgcaaaccaacctggacgaggaattcgctcgttccctccagatcgctgaagagagacaagctgaggtccaggctcgcgctctgcgggaaaccggatccagcctttctaacagcagcggattgtcttaccaacccagggcgcctcggggggctcgtcaagactccaatccgtttggcgaagaagagcatcatgtcagcggaggcagtacgacagggtacgattcgtatggacgtccgctccagcagcaacaggactataattaccgaggtggagctgcttcgggtaggaccgggggtatgtggggtgatgaacaaggtgggcagggagctggtggtgggccgctaggacccgggctcgaggaaaaatttggaaaatacgcagaaggtaagagtattggggtcgttttcggaaaggggactttccccgctgaccatgcgatggaatcacctcagtgggcaagcaaaagtttgacatgttcctcaacaccgctcgaaccaaggtcaacgagtttgagcagctacagacgcaacgtcaagccactggacagcagcaagccgggatcacgggtacactaggagggattttcaacgatgccaaggcggtggcgacgggacgccgtgatggtgcgcctggctacggtcagggacagggtcaaggacaagcaggccagggattggcgggattcggagctggtgtcggttcggctctttcaggcttgtccgggttgtttggcggacgaggggcgaaccaggccgagcagggtgcgcagaccggcgcgggttcgtcctggagcagcaacgtccagtcgaggtcggctgctggtggtgctcttaacagccgatcaggtgcgacgcagggtcagcaatcgtactccaacgctggtcggaggtggcagccgaccgatatctatggtaggtcgcctcgtatccagtttccttcggtgctgctctaaacataccctttgaattcgtagacgacctcgaggaaccggccagtcagagcaggacgatcaaaatccatcagcctggatcgtcggcatcgtcggcatcctcgatcccttccacctcggacgatttcttggaggacaatacgcccaaaccagagtccgacctgaacaagaggtttggcgcgggtgtcggaacgggttcggcctcgggatccggttcagctggtgcaggattgggtggcgcgcctcagaagattgacctcggtaagcctcctagactctgaagcgatatcacttgtcactatcctagctgataccgtctgtatcggaatcatagccaagatcggtatgctacctaaacgtcaggtctctttgctcgggacgtctccctcggctaccaacgaatcggtgcataagcagattcaacccgctagtacgagcaagcgagacggcaaggacgatctagatggcgaggaagagtataccaagtgagtcaagcggtcaaacatgggccttgacgaggagcaggatggtctaacgatcccattctggtggatcacgcatcgcaggagcccattcgaaaactaggtgccagcggccgtcagaaagcgagtgataggaatcttgacccatgaatgacctgtaaacgatccggtccacggaagctaggcggcactgaactgtcctgattcgtttgtaactgtgatgaatatcgcatgaaacgtatcgacgtggtggtcggtcgagactcaggctggatgtcatcatcaggttccggcgcggggccgagccgcgccgaagcagcgatcaaccaccaagatcaacctcgacatcgtcgagtattgccgacctttggtcttagataccatcacatcggtcagccgcttacaaccttgcaactgccgagttgtaatctgcggacgtggaaacactggctacgcctttgaagccgactccagtcgaccccgtatgcaccttgacccaccacccggacgacctgctcccgcgacttcgcccacaatcagcaaccccctcgatcccatcgaaacacctcttccattcactctcaaccgccgtcgagcacctcggatcgaaatcgaggacatcctcggcgatcaaagagtcgtgggcaatacagtcttttacacgggcgagcatcccaatcatcccaatcgaattcgccccggccttgtccggcgttccgttcagcccgtcgacttgagcactcttacgtcgatcccacgactcaacaccgagccagtccttatcacagccgagccagtcgtcgccattgagacacctctagatattcctcagagcgagattgagtatcgagcggcggggcagaagagcgaaatgcacggtcactcctttttcactagggttaggcccgattacactcagccgcaagcggctcataaggctcggatcgagaagccttgctacctcgattcagacctcctcaagactcgcgaagatgatgtcatggtcagttggactgatacggatagagttcgacgctgggacatcggagaaagctaatccattgcggtgggctgtgactggggacacagcataatctcgttctcgagtacctttccgatagatgcttcccagagactgccaggatcttggcagaagggcttcctactgcatcgacatccaacacttctacttctaatcccaaggagtcttctctcggaagtgatggcccgaacgaggaactcacgcaacgcaagacgctcgaagttgacacggacgtgacgatgatgtcgtcatccatctcagatctgaatagcatcatcgacccctcggctattacgacatctaccacgccggggacagcgatgcccgaaacgaacgaatcgacggtgatgccttcgatcaccggatggtcaggtcctccctcggccgggacaatcacgatgaacggcaatgcaaacggcaagacaaaggttcatcagcatgccgcagatgtcgacatggacacggacgccgctcgactcgctcgaccggaattacagcgtgcatccacttcgacccacgagatctaccagcgaaagcatagagaagcatggctccagcaaattgaatcgagaaagggtgagtctttgtccgaggcaacacaagtgatgatgtgtcgcgggctcgctcaccggtcatctccgcgtttcgaacagagattcgtgatagcatacgagcgggggatatcgtatgcggtatggaattacttcgacgtgatttcccaaatgttcttggaacctacggcaccgtcccggcctctgcctggaacaagacctcggacgatgacgaggacaagagcgagggctctgggtcgagcgtcgatgaagagtccaatgactcgggcgagtctagcgaggatgttgatgatgaggagcgcgaggaacagcaagaagaaacgtacatggtgcccggcctggacgatacgaccacgacgacttctgtggcttttcctggtttgaaagccggtttcaaatccgtctctctctacctgaatctggagatccagtcgtttatcgaaaacgttcggcaactcgaagcgtcttcggacccagacatggacttttcgagcatggcttcatcgatgcactccgatttggcagcttcggatggctttcggaatggcaaaaccggggtcatgtcatcgggaccttcgagagattcgacagccagtcccgacttggggtcgacgctccgcaatggcgacgttctgggtgggaccggcagtaaatcgagtcgaacgctcacatgtgtcgctcaggctcaaaagctatacgtcgaggcgaccacctacctggacgaagacgctgccgagccatatgtgaatacgatcgaaagcgtcactgctctgctcgcgtataccgatatggcggccagtccgctatcgtgctggttggacaagaagcggaggttcacgttggccgagatgatcaactcggcgatcttgagtgagtcgacgtctgtcttgatacaaacacgcgtggatctgatggcctgcttggaacgcctctcgtcaggccgagggaacccaacccgccacgccactcggtcgaggctcgaatcgattgctcgccaaacaagcgcagtcatttcgacctgcaagtcgagaggattcgacgtctcgccaccgtggaaagtagacaaggagggcattgctatggcttcgcttgcgaacgtgagccgattccattccgcgtcgccatctgacggggacatctgactgagcagaactttgcgtcgattgatagatggtcgccgcaaagcaatctttcgacctcagtacgtttttggctgagcagtgaggcgttccgcaccacgttagcgcttgtatctgtttgcgaccgattctctgatttgacgatctgtatagacgccgttgttgtcgttccctatgatatgtcgtggactgatcgccgtctacccgttgtacacattgcctgctcgccattcatgtatatatgcgcataacaattcagattccttgcgactgctttcgattctatggcttttggttcgtctttgcctcgctcgacgcctcgcttcgcttacaacatcctgacggggtcgccagtatatgcatttccattccagacaccaatcataccaacaacaacgatgccaaagtagcctcggtggccatgacctgcgaaatttcaaggtggacgtcgtcagtgtttgtaacggatgaatctggatgggctcgctcgggacacccacctgaagcgcctgctcgacttccaatcgcttcctggcctctcgcaaccaatcgcctgccaacttgccagcccagccttgcaactggttgacttgcctagcggcgccgtcgagatccttttcgttcaacaagtactcggcccgagccaagacggccccgacgtcgtcaccctcgacccaaccagctcggggtcggaagaggaccttgctcaatcctgccgaagcgaggtgggacaagacgccggcctcgtgttcagcggggacgagcgagacggactggatcttgggcgcgagggtggtgctgaaccaagaagacaaggcggggaacgacttgatcccctcggtcgcggcgtgactctgctcgatcgactcgatcatggccgagacgagtcgcttgctctgctcgtccgatgcggaagaagccgcggcggtggcggccgtcttgaggaccctgagctcgtcgtcgaacgcgacgccgcccttgtcgacctttgcctggacggcacggagggccgaccagagggtgtgcaacgagacgttggcgtcgagctgagacgagttgtccaaggtgattcgctcgagctgcttgaacgacgtggtcaagttgtccaacttggacaatcgtccaccgcgctcctcctcgacctgggccttgatcgacctcaaccatcgtcgctggagttcgatcccctgagcaatgacttcttcacgcagcctgtcggacggggcggcgaggtgggagatgagtatacgaacgtatcagtatttgcgggtctcgcggcttgtccgaggtggacggctctttggcgctcacctctgctcgatcccgaccctttgtccctcgagttcacggtccaagacctttctccacccctcgaccaatttctccctctcttccttccaaccttccatcatctgaccctccttggcggtccattcggtctctttacgcttcagctcggactcgaactcgttcttcttcttttccgccagatcctggagggcggcctgttccttgtccttgagggcttgcatcctcgaggacaacgaggacaggtcggtctgggcgcgggagaggacgtgttccgggtcggcatcgttgttcatgcttcccttggtagacgacgtgggcgagagggacgaggcgagggaatcgatcgtgctcgccagctgggcgatgatgggttcctgctcggccgaggtgaattccgctactcgaggtgcgaggaggggcaaggtgggcttgttgaccggggtcccctcggtcttggggtcgggtcgaacgagagggtccttggcattgtccgcgttggtaggggtggggacgatggcgtcggggagcaaggccgagacgtctttacgctcggcgttgttcttggggataaagtaaccgacaggaggttcaaacccgaggggcaagggagcgcccgtccagggtttctttccaccggcagcgacgaccttgtccttgggtcccgtcgaagccttgacgtccctgggtcgctgcgtgtcgaccatctgggcctgagcgacggggtcgacggcgggtccacccttgttcatcgccaaaccgtggacggcgcgtttagcctcgtcgacctcggactcgaccttgctctcggctttgtgcaaggcatccccagccttggactctgcacggtggagagcctcgcccgccttggactcggcccgacccaacgcgtcctcggccttggagacgagttcggtcacgccctctgaaaacgccgggacggtgggcaacttgctgaccagctcgtccgccttgttcttgaccacgtcggtggcgtgtcctacctcggccttgatcccctcgacggcacggtgagcggaatccgacgtcttttccgcggcccgtttggcttcgttcttcaactcggcggatttcgacttggcctcccgttcgaccttgtccaccttggtcgtggtcgaggacgcgggggtcaacgccgccttggcctgctcgagctgatgagccgccttggcctgaacctgctcgatcttttcgctcaacgagtgtccagcctgtttagccttgacctcgacggcgtccttggcctcttgagcgcgttgcgagacgttgcgtgcggatccatcgaccgtcgacttgactcgctcggcggtcgtggtcgtcgtggtcgcggtcggaccatcggtaggtcccgttccagcgaccttgttcgacaaccctttcgcaccgttagcgatcgatcccacggtcaaggcgtcccaatcgttctcgtcggcataatcgaccaacgactcggcgaggggaaaagtcgaggtgaagaaatctcggtacctatccgagtgggtcgagatgagggccgaggtggggtagaataccaaggttccgagggtgaggtagatgaggaatttcctagcccacctggatttcggtttacctgcgggggaaggaggaggagggggaggaatctcggaggacgagttggacagtcgagggtcggtcgatgacgatgacgccgtggtggtggtatcgacgacgacgacgggtttagcggggataggtgcagcggtaccgacgacggtggtgcttccgataggtggggagacgacgacgggtcgagcgtttccagcggccagcggggtaggaggtttagggggcagtctggtcgaggtgggtccagccggggtctcgatggcgtagcgctgtgatcgtcaagacgtccgggttcataggtgagatatgacattgttcgaggagagcgatgtgattgaaaagagaaaaaagggaagagagagagagaggcgcaccgggcgtgaggtcagctttcgaggtcgtcggacattgtcggtcgatccgagatactcgccctgatggcctgacgctggacggtgagcggacgagcgctgatcaaccgagcttgcctgtacatgacggcaggtgggtgacgggttgaatgaggagtgggtggatgtggcagactggatagtcaaaaagtcagatgatgatgaggtgtgagagagagatggatagataatgttctatcccatcatggtcatggtcatggtcatggtcatggttggctgaggagggtgagatgggttgcgtttcacggacattgacatgtttttaccaccattaccatcccgtggcgtggcgagggtggggggaaacgtgtcaatgtccgctttctcatctcccccgacctccaagtgatgatatctcgacctttgtcaagcctgtcaaaacacacatctatacccgcttgtacaacgtcgtcgtcgtcgtcgtcgtcaagagcaaacaaatcggatcactgatagactcttggtgaatcatgggtcgaatggcagagatgcagcgaaagctgctagaagtaagcatactcccgtcaccctagcccgatcgacctgctcatagtcccacaccggctcattcgaatcccctttcctacccggcatcgcatcgcatcgcaccgtagcaaatgatgggtcccgaagccatgggtgtccaaccgatcaacgtcgactggtgggatcccaaagtgtgcaagaatttcatctgtgggacgtgtccgcatgacattttcgggaacacggtcagtcctccctcactcgatcgtcccctgccttgcggcggcggatgcaccctacgacagcatgactgactgaatcctcgatgtttcactctcccccttgtggtaaacgccgccggacttgtgtttgcagaaaatggacctcggaccgtgtccccgtctgcacagcgaaaaggtcgccaaatcgtacaaggccgccaagctcgcggatcctctcgacccccgcttcgcggcgttcgagcaagagtaccagaacagcatctacaatttcatcgacgattgtgatcgcaagattaggatctcgcagaaacgtctggaaaagacacccgaggagaacaagcggaccgtcgacctcatgaaagaggttggcgagatcgagttggccatccaggggagcacggacgaggtcgaggcgttgggtgaagctggaaagattgaggaatccatggccaagctcgaagcggtcgaagcgctcaagggggaaaaggccgacaaggaacgagagttgcagaggttgaccgagacgggtggagcgtcgggacatcaaaagttgagggtgtgcgagacgtgtggagcctacttgtccgtcttggattccgatcgtcggttggccgatcatttcggaggaaaggtcagtcgtccacaaccgcggcagacacgacgattcgctgagacggttcatcgtcactgcccgccatagatgcacttgggttaccacgagctcaggaaactgatcgacgagttcaacgaacaacgccgtcaaggtcaatccgctcgattcggccccgcactcaccaacgctcccggacccggtggacctcccccatccatgcccagcaacaacaacctcgcccctcctcctggaatctccggtcctcgatccggtttcgatcatcaacaacaaccgcatacccctaccccgcattcgcatggatccgccgtcagcgtcaaggcagagttgccttatgacggggacgccatcgttcccgggcacggggacaagaggaaacgagaggcgcacgagttgtccgatgccatcagggagaacgaggagaggtgagttcatctctgcggaccaaaagggcgtattcgacccggtcacaccgagcatgggctgatcattttcctccacgctcgattcgctctctctctctcttcagagacaggaagagacatcgttcgagagagaggagcgagcgggaccgatacgaatcccgtgggagcgaccgcggaggcggtgacgatcggtacgaccgcgagaggcgtcatcgtgatcgaagccgagagaggtaagtcctacggccatcaacggctacgacgggccgagtcggcggcatgcgatactgaccttgcttctttcttgccgcaggagccgacgtgatgacgatcgcgattaccgtcgatcagacagggatcgcgagagggacagggatagggactcgaagagggacaggtagtaatgtattcgttaccccctgtctatcgacatggactctgcccggcctcccttttcatctgtccacctttctctgtatgtatagtctatatcgtgcccggcattgccatcgacgctcgtggtcggacaatgtcggttgacatgcgtgatttaaatcgggtacaataatgaatgctgcagagttatggcagctggcgtgacatgcaggtgcccctcgctaatctgacagcaaggcgagggaacgcggtatcaatatgggacggttcgtattcttggtcgttgtcgtttttcccctggcgaaaggctagagatgcgcctcgcaaatctcgcatacgaggaaaccgggcttgttgagaaaggtgcatgtcgggcaggctgttcgacgattataaatcagcgcgcagaaaggttatcatccgtcaccttgccgctcacctttggcgtctggcgtggcctcttccacctcggcctccatttcgacatccggactcgcttcgggagaatcttctgtgctcgaactctccacgggcagcccgtgcaagagcgtattgcgaaatccaccagcggcccgctcagctcgtgtcgtcggtacgtgttcgatatccgacatgtcaccgtgcatgtcctctgcacagtccttgacatggaccacgctgtcaaacacgagaccagcttcggcgatcgacaatgctccatcggcgagttcgttgccttcgtgatagattcgctggtaaaatacgggaattttccacttggattcgatctgcgacgagcaacgtcatcgtgagtatttgttgttgccagctgtgacactgaaattccactcgcattttgcttcaaatcaaggacggtttggtgctttcgcagcgtcgcctcctcttcctttcccctggcgccacgtgtcaccaatctgttggaacggcgaatcgctgctgatggctcctttgcatcaatgtcgattggattcgctcgtggccccagattgttcaataattccccgcttgtttgtccgttcgttccgttctcacgcgcagaggcgacgggttcatttcctggcaccttgacttcgtcctgtacgagtttgtaacgaatcctgatcttttcggcgtcgccagtcattctttgaggggagttccggaatctcaacgccgagttctgaacaccacaccttcgaaagcagaagtgactcaccgttcctgccagcatggtctacacaattccttgttgacctcggggggcgtcccaaatttgaccttccgcgaaggacgaacagtaataatttcgtcatcaggcatagaatacctaaatgaacgtggtcaatcagcttgtagccgcgggaaacatgagccaggacctgcttacatggactgtaagcggtagaattccgttggcagaagggcgtacaaagtgctagagtccaggttggtattgtaggtaaagtcgatattggtctttctgtgagcacacaggaagcgctcgttggtgaggacgggtcgattgatatggacaggatcccggatgaaactttgccaggcggtgaaaaaggaggttggaatgatgtagttctccttgtcgtctaccagaacgatcctctctccggtttgtctcgtcaatacgctcttgaggagcacctacatcgtgtcatgccgctcagttggctgcactacgtcacatcccaatcgatgcactgtacctgctcagtctcagcttgacgaatatcctcggatctagccgattgtagttctctttctgcctgattgcactttttgcattcgtcgctcaatcgtacagtcaccgcgtcaggctcatcggaaacgagaatcgcgtgtgcctagtctcccagaggcaacagataagtttctcggtcatgaagatatctacgctagatgctcaccatcgtattgaccacctctccgaggcctcttcgctggtcaggagtctttgcggcttgatgaacacacaggatttgagccttacacttgtcccaccaatcttcgtccgagtcttcttttgcctgtctccagtcctctctgcgccaatctgcaaagagtcattgagcaattccgtcttttcgagagggagactaatccgacatacgcttgaggaacagtgaagataacagatacgaatcatcaagttccactggttgcacttccctagctaccttgaaatctcggattgcgttccggtgcgaatcatcggcgacgcggtcttcaagcagtagtcagacagatgccgcattgttttgagcgtctcaggggtactcacgagagtgctctttctccacgcagaactcgcatatatcttccttagagaatggatgatcgagagtcgccccggatccgattattttttcgtgcgcgtccttcggtaggtaggcgcttcgctttaacgtgcgtctcctcaaacgatgaacgacgactcacctttgaaatgtatcgcatatcatagccctttgtcggattcaatttcaagtggatgcaacggatcttcttgttggataagaaacagctcatagattcggtgctgccattggacccggatacggatggcggcccgtcgctcccgcgccccgcgatcgggggctggtccgaagtcgatttttctactgtcacgcccgaagttgcttcagggattgaagaagatgctttatgcgcgctattcgaatttgtaggtacgatatcgttccctttgtcggcaaggtccacgtcgttatcgattgctttgtcgtggtccccattcgcaaagtcttcttgagcgtcgcttcggatcgagtggaccggagaatctactcgtttgagcgatttcttggggctacaattcgatttgtcgaccagcccttgctcaatccagtcgatgagagcttgtacatgcacaaaccgaccctccttgaatcgttatgtaagccgcctggcctacagtgacactcgccagaccgcttacctccgctgcttcgacgtcccaagaggacatgatatcgatcttttcgcctttgacgcgctcgaattcagtggacaaggcttcctgccttcgcacgaaaccacttggtcaatttggcaaggccgatcatccaaaaaaaagctgcaacctacttttgcgtaaaggcgcctccgtctgtttcccatacgaggttctcggcgtcgatcaactcggatgtccgcttggccggtactggagcgggattttgttccgtgtcgtcgtcacttgccaggccgtagacgagcatgtaggcctgttgactcttgtggatcctgagggcatgagcgtcagcttgaagttggggtgtgaaaccgaagcgtggcgattactgactgtgcaggcgtctccgctgtaacactctttggtctcgaccgcgtacccgtcacccgaacatcttcctcgtcaatcttgttttgacctgcgtaacttttgatcaggtttccttttctcttcgtcgtaccggatcggcctcggctaccaggcaagaaactatcatcagctaagcggatcgagcatgccggtgtatgaaacgcaacatacctcgttaagttcatctcgtcgtcgtcgttgtcgtcatcttcgatcgggtcatcaatcagaatcgcgtcgttgctcgtggagccttcaccttgtactgagggcaaggcggtcattggtcgtatcttggttgtcgtctcatcatcacacaatatccattgctttgctctagggggggatagatggtcaagggggcgggttcttgaccgtcaaagataaatccctcgactcactcgctatcgtaaactctggccacgaaatggccatgatgtgcctgaatcgatacagggagctcagccgatacccaactatgtccctgttgaccaagctagactcacgctcgttcctctatgctcgattacccctttcagttcgtaccacgcctcactccctgccttgtcactcatgtacggtctcatattgatcctcgatgggaacttgatcatcgtcttgctcttcttcctatcaaacgtttttggatcgaaaacgaagcgtaataaactgaaattcaaggtcggcgggaccgagtcaatctggacggagcgttgagcgtcccgaaggacgttacaacgggaacaatggtattgattgtccccatcgagcgtttcggcctggagcgagttctgaagcctgttgatcaggctcgactcattcccctgatcggtaagaaacatcggatgactagttagctcgatcgggctacagaagcataggcgggggactcgcctccatgctgatctcgagttcgagaaagttccctttagacgtttagcaaagtcagccttctcgcagcagcaggtcaccacctggttcctcgactgacctggtcgttcactgacatatccacacgtcatgcattcggtcctgtaccttagtttcccctcaaactgatgaaggaccatttagccgagcggcagatcgcgacacatccgagaaggtgaccaacctgatcgttgatgacggatttgacttttggatcctcattcttgctaaactctccttgcaacagcgccatgaacagtttcgagaacctaccgacgagagcaaaagaacggctggcgggtcagtttctggtcgaaccggattatacgcgccaggagactcggaactcactcgctagcatcctgctgatcgcctttttccaattgtaacgcctctaccagcccggccggatcaaagactgactttgtcgatttttgcagacccgtaaacgtgagcgcgagttggaaacagggactcgtctgtcgaagcgccaaggcggaaaaggtcttttgttagcctcactacgcctgcaatctcggttagaggcaaaacctacatcgggaagctggggattcgttgcacaggcatagacggccgctcggaacggcaagatcctgtaccacaactacgagcgccaatcgtttctcgatctgtcagcctttttgtataacggatttcgacagctcgtgtgacttgcctggagaaacgcattggcctacaaggagaaaccgaatgatcatcaggatattgccacttcacggtcttcaggtgcatgagtttgagctcgggaatgggtcgcacttacatagcacgtcgcacccaaattctacccgccgaatgcgcccaagaccgatgaagacgaccgcatccacgagccgggtcagcatccctcgtcagctccacgttccaacgtatctctggctccttaccctcaacccgacgggcaggactggatcccgctgttccaacgccggatcgggacctagtcctcgtaaccggagaaaagtctgtttggcggctatgagcgatcaaaagtagaggacgttcggcatcgaatttggttcgagcgagaacaagaggggacgagggcggtcgacggtcgtttggtcggaaccagcggattggacgattttcccggaatcgtccaaggggtgtcggaatgcgtgatggcgatggcatggcaagatttgatgaagcacgtacgggatcaaagtcgaaaggtgaagaacataagagccagatcagctcgatctcattggtatagacagttgagcgaccttagagctcacccggatccaaccactgttcgtcgatcaagccgagagacgacctcgcggaccgatcagctgatcactccccctcatgatctcgcgtaccaggccttcaaccccactcgcctgcttagctccgagataattcagacaagtgagattctctttacaccaagccgccgtgcaagggggaccctgtatcgtccccggcggggcagaggaggaggtcgaggacgaggtctttgtcctcttcctcggattgtccgtcaagggtctcttcgatcggcctcgtttggatcgggcggtaccgttacgtgtggatccggagggtccttgggctttcgagtgcgggtcaccttgatcgtcgatatcgatcagttggatctcgtcctcctgctcctgcctatcgtcattcccaattccatccccctcgaccgtgaccgtctcttcctcctcttccctctgtcgagtgcgtcgagaaagcagagccagcttgaacttgttctcgcatttcctgctagccgccaatcctaacgccctttcgagatgttcctgggtgatctcacgggggatagcgtcggtcatgtcgtcgcaccacgtccagtccggtcgagggcgtgtcgaggggacgttgctcgagccgacgcgtttgttgcgtttagctgtgggcatgctgggcgagtttcagggtgaggtcgcctggtcggattttgagacgaccttggttgtggaatgcgacgaacaagatgaggtagactgggtgtatactatatactacactctgatgtaccgtgcgtggtatgatgagtactgtaatgctcgaatgtcggtcaactcctgttttacggaagtaaatcgagttgattacgagattacgtattatgcggacattggcatgtttttacgatccgactcgggagtgaatgaatatccgggccgggtaaacccacgtctgcgcctatgctgactgactgactgactgtttctgatgtccgtgttttctggtgtgtctgtcactctcgggtcaatctcgaatcggatctcacccgaagacgccatcgctcagcaactacacactaactgacaagaggcaagtcattcccatctcccatctcatatttcgataccgcgatcatatcaatcacacgatcacacccgaacgactttatcgaaaacacaactagcaacacgatgatagccacggccacggctccgtcgatcaccccgtcatgccccctgggcagcgccatcccggccatggtcccgcacgccatctcggtctcgctccccacttgggaagacgtcgtcgggtacgaggaaggcgagaaacgggtcgtcgagagcatgcagacgggttaccctaggttctttgttcatcgtagcattcaaaaggtgagcatatattcacctctcgcttcagatctccacggtgctctggtagctgaccatgacgtacccacatttggttctggtcggacgacccagctcgctggaatctgcctccaaaaattcggtctccccgatgaactctgcacgctactccccacacccaaagtcgctcaagccgcacggtcctttctcctctcccgtgaccctcccgcaccttcccggatcgtcgaattcgtcatctgcccctcgacagcctcgctcgtccagccgggggaggaagacgccgtcggtggggtcgattgcatcgagctccagatcttgctgtacaacaggcatttccaaccgatcgccaagcagttttggcagcattccggggatggcatctcgtccaggacggccgagcgggggttggcgttcctaggggaaggcccagcgggacctctgggacctccggcaccggtggaaaaggacgtcctcgaagggaatcgtgtgggggacgacccgagcgcatcgcccacgtccacttcgtccatcttgccagggacgggtaagctgtcatattcgagaaacaggcattattcgaggagcaagagcgcgctccccctggcgctctctcgaccggcttctacgaccgggaccaacaggaccggtacatccgggttgagtccttcgacccctctgactccagcgtcgtccacgaacaatatcaccccgacctcgacgaacagcgcgttcgggtcccgccgacaagaccccaaagacgatctcgccgaggacctagacgacctctccctcgaccactctacctttttggaagaacggtacggccggaacctgcccctctcctcgtcgaaactcgccaaactcgcactccgacgtcgaatcgcggggacactgttgccacacgagaaacccgctcggagcggggcgggagcgttgaacgaggttccccgtggttcagggatgagcgatggcaaggtcatcgaatccggtaaaaaagtcgacgtggacgacgtctacctgtacccgacggggatgagcgccatttggcatgcgcatcagttggccatggcctggaaggagaggagggacgggaagccgggcaagagcgtgtgtttcgggtgagtctcggagagggtcgttccgcgcgttcgagctagcgagtctcaatcggctgacgttgggcttttacgtgtcgaccaggttcccctacacggacacgctcaagattctgcagaaatggggacccgggtgccactttttcgggcacggcaccacgcccgatttgcaagccctgtcggacctgttggacgagatccgtctgtccaaggggaccccggatgaacagaccccgatcacctcgttgttctgtgaattcccttccaatcctctgctcagatcagccgacctgaaagagttgagaaggttggccgacgaacacgagtttgtcatcgtcgtcgacgagacggtgggtaatttcgtcaatgtcgaggtggccagttggacggacgtggtcgtcagcagtctgacaaaggtctttagcggagagaccaatgtcatgggaggaaggtgagtttgaaggtgatggcgcttcgcgtcaagcaggcgccttttgtttgctagtcgctgatgacattcccatcgcagcctggtcttgaccccgcattccaaattctacgccgagctcaaatctacccaagaggaccgttatgaagatcactatttccccgaggatgccatctacatggaacgaaactcgagggatttccgtcatcggatctcgatcatcaatgacaacgcgtacgacctcaccgagatgctcgtcggaaggtcgcagatggacgccgagggcgtgtcgaacagcgtactcaagcgagtgtattacccccgctacatgaccccggaaaactatgggatcgctcaacgactccccacgacgggcaagggtggattcggtggactgttctccctgaccttcaccacccaggaggcttccaaggcgttctttgacgcgctcgaatgccacaagggtcctagcttggggaccaactttaccctagcttgtccatacaccatcctggcgcactacctcgagctcgattgggccaacgaattcggcgtagagtcgggtctggttcgagtcagtgtcggattggaggagattgagagcctcaaggcgtcgttcttgcgagccctcgacgctgcgcaaaagacggcggcagcgcaggcttgagcaggaaaataaaaggtccatcaggaaaggtcatccctcaggtaggatggcctgtagctatagagagcatgcatagaaacgacaagcgacgacacgaaagagcaagtgcaagttgtatttcaacattttgtaaagacgagcgtttgacgccatccatccaacatggatacgaaacatgattactttcttgtcggtgcgtttctcttctcgtgtcacggcgacggctatgaccggatgtggattgtctgcagccggtgccgacgccgttgctcgtcgtcttcgtcatttagcatgtaatcattcgttcagaaaccctgaactcttcacggccgccttcgacatatgactgcaagctatcggtagcacaggcccgaaagatcgctgtaaaaatctcatatctgctttgaacatggccactgtcaagctggcttcgctggccatccgagtgagtgccgaagatagctcgagaaacagcatcgtaacctgacctctaaggaccgggtcacctccgaccttatagacagctgccaagcccgtagctagctggctgaaatcacaagctactcagtgagacgacccggatctagctcttctctccgcatctatgctaaggctgtatgtctgatcgcgactcacaggcatgaacgattccggacgttttgtatcaattgggctcaggcgaggacccgcaagtacatgcgtagcggaggatgaccgactgatacctctatctatgtgaacagaggatgcatcggatggaggcacgaatgcgaaccgggctgtataatgggcctgcaggggatatcaaaccgctgaatgagacccggtgagttccgctcggctgtttcggcacacggaaggtgctggagctaaagacctgaggtgtaccattcagagcaatccagaatggagctaataatttaggtgggtcacttgcgcatcttgtatacctaacgatagaagctgacacgaccgcgagtcattccagcggagatcttcttgttcggagtggcagcaacgttgatactcggtgaaacgtaggtctaccacctgtcccctcttcctgtaatcgatcgagcggctctcattgaccgactttcgcatgaacatagatatcgagggtcaagaaaagtcgcaaaccgaagggacacggtggatgacaagttagaggatctacgtgatgacatcgaacggctgcagaaacgctggcgagaagaagagatcgagctcgagcggagagcaagcgaagcggaaaagaggtgaatttatgctgcctttgttgcgaattggccatctgcccgagctgacgcaacacgatgtgcccgtatcgaaagaaacgccgagctgcaaaacatcattcaagccgtcgtcgatgctggaacacgaaacggatggctagcgggtcacttgacggtaggatcaggggaaaagaccgagccgggaaattcgtcgaaacagtccatcacacggacgctccctgttctcgacctgacggcatgggagatgacgcctatgctgcaaggcacgacagtcctctcgaatttggattctcagcatgtagacgagtcgaaacgccaggcagacgggagccaaacttcaatagcataatcattataccctcgatataccggtcggggtgagcagcaagccctggtcaccttaaatatacaacgtgaaggatatgcctactattgccgcgttagacaataggctgagacggaaatcgaaagcgaaaaagtgggagaaaaagtggcagcggtcgcctcgtgctaatagttgtctcgatcgcggagaggagtcaagcgtgccacgagggcgagtagaactggtgtctccgagctcgccatgctgcaaaggtttcatcatcagcgtttcgaacacggctcggaccacagggctgcactcactaggtcacagtatcgagatgggtggcaacatgatgggcaaagtgagtttcaaacttttgtatgagcccccatcgcttggcgatcttgtcttccgtcgactcagcacgtggatcagccttgaacgaggtcaataaccgtgaaaaaatggactgatggttggcaaaagtcgtgattgtcttgacaagcttggacgtgacctggcgagcgacaagcgggtggacatcagcaccgcaggcgtatattccgtgagtacgagaagaaagacctacggtaatcagtttgttcgacgtcaaggtgcattccttgagacaggtatctaggtactcgacgtggtctctcagcagttggtcaatggtggacacctttgatagcttgtcttctagctttttccacttggtttcgaggacgtccccagtgacgaaaccgagcatgtgctgaacccattggagcatttgggcccgcaagacaaagatatggcgcttccagcgttccatgtcgggtgatcctgtcgacctgcgccaattcgcagtcttgtgctcggaccacatgttcgcgagcgaaaactcgaggtatcggaggctcaagaggaaccggaagatcagctggtaccgtgtgatcgctttgcgggagataaccagggataaagggaattggacatcaaagtcgaatgatagggcttcaacggctgcaacatgaaacgcgatcagttggtacctagactcgagtgcaagatgttgaggcctactggttatctccttgtccttttccttggcctcttctgccttgctctcggagggtcccttcattgcggccaggatgccttcaccagctcgctttgatacaacagtcaagagccagtcgtacagtggcgtcgtcgacatgacagcacgaagttgttccttgtgcggatccaaggagctcgcgctggcggggttgctgactgccatgtagaggagcgactggatctttgtcatggaggccgaacttgcgggtttcttgagttcgacatgggcattgtcgaagaattggttgagaaattcggattggtccaagaagaaaaagtgcttcattgacctgcaacattgacagaataaacactggtatcactagatgacacagcctgtcatagagcattcacttacttgaggttgggaatcagctccttgccacgcagaatgaggtccagcaacgtcttgttcgagtggaagtatgctgtctctatccgttggtagaacctaatggatgcgattcgatcagctatctggtcacgatcggaaagggcatcgagtcgaggcttacttgggttgatccatcctgactaaactcccttccgtctgttctgcaacggctttatcctgctgctcccagtccgcaatctcgatcccgcactccttgatgacattgaggtacttgccggccaacaaaattttgaacttccaaggttcgaggaagggaggtatgcaggcgcccccgggcaatcgattcgttcccggtcgacagacaggcacgaacgcttggacaggagcatcgctgtatgacttgcctaagttggccaaacttgagccgtctctcagctgtcaaccgtgcaacagaagggtgagattttgccttggtgtcggagcctggtcatcgtcatcgcttaccgtatatctacgctcccaatactcatccgaatagtcgtacaccagttgacctttgtttatccgtgaatcctccttgatcagaaattcgtcgtatggatctttcagcgttcccgtagtgatccatctgatcaacgtccgcgcgtatggctgcgaagcgtggagcagcaccgaggaatacaacgaatgtgccgcagggtcactaggttgagagcaagattagcttgcccgcgctcgtatgggacccgacgagaacgaccgctttaacccacccgctcgttgccgctgctcgctccatgatgacccccaagacttcccctcccatgatgttcccgctggccgcctccttttcaagctgtttcttgctagcgacacccatttgctcgaggtccagcccgagctcggcgaccatcatccgcatgttttcgttggcatcgtcttcctcgctctcctctcccccagagtcttcaaactcggggaacggatcatgatccagagccaagcatagcgcgtacaagagggaaaggatatgcaaggtgggatggaggtactgaaaggcggattggagcgtaaagtctggcgaggtcaggtagagcgattctagcttggcggtgaggatgtgatagtcctgccgatacgcctccaaagttcagcgctgcgattgcgactgaagatccatgcgaggcttactctcaagacccctcggattccgctgcccagagcgtgattgaccattccgaaagcggtgtcatttctggaacagcatcgacattattcagcctgccgtaaatctaggtgcgaggtaggaatgttccaactgaccgtagctccacaaacgctttgactgccgtgaaaaaggtcgctaggggcaagatcttttccaccatccgtctcagagacggatctgatcgcgatggaacggtagccaaaaggtaagccacctcgtccttgcttgcagccatttggaatctcacctagtgagggatcgatcttccacctcgttcctcgtaaccgttggacctcatcctcgggatcatagtccgtcgcgaaactgattaactcgccttggaccccctagtggacgttcctcgagcatcagcgcgcgctttaccgacgagttcgtcgtctcaaacggacgaacctggaggacgaaacgcagatcttcacatatccacgcttcctgcacgaccaatggtactccatccagttttctctcttctagcagcaatatcgaaccggcgttcccatgccttcccgcaccggaccccgcggtccagggtccgtcttcgtcctcgtcttcggtcgaaccggtcctagcgtggcctcgacgtcgttcactcgtattcgccgtctctgcacggtgctttcccttgttcatggcggaagatgaggaagacgggagttgtctctctgctcgggatgtcgggcgggaagaagatgcgtgctttgaagtagggtggtcttccttgcccactccgaggataccgttggtccgaggaagagcggtcgacgaggaagaagaagcgtttcgtcgaccttctgtacccaaagtcgccgtcgtcgtggcggcccccgtcctcttcgttccttcctccacggtgaccgtctcgccgtcttgcaacccgtcgcgttctcgctggaccttttccgaagtaatcgtcgacgcagaagagacgttcctctgttgtctgatgactgacggtttgatccccgccgccgaattgacccttgaagtgagcggacgggagcgataagccgattcctccaggtggtacgagacgtctggatccaactctccgtcgatggcacctcctccaccagcttccagttcggcccttacgcgatgcctatcgacttttcgcacactcgccaaggtctgtgcgatttgggcgagctgatgctcatcctcgagtcgttcccggggtcgatgtttaggacgaggggtaaaagggacggtagtggacgtgatgatcgggcgggaagaagacgaggttggcgggcgatgggaactcgccgacgaggaaggtcgcgacatggcgtcctaggatgttcagcaaagccgagagaggagtgataagtggatgctgtgtcgcagtgtcttgctataaatgtcgtgaggtagtgatacagacaggatgtagacggcggtgacgaccgatttgatccgagttcgagttcgacttcgagtgatccctcgacgatttgttgacatttcgtttctacatcagacgcgaggaggatcaatttcgaaacaaatcggtcaaaagtctgactcgcaaatggacagaggcccgaatcgaactcgcgaccctgcacaacgaccgattatcaattcggaagtatgcgcgtcgccgttgatgccattcccaccaacagaatggatgggtctcggaagcaaatacttccggtgcgtgggttcctttgttctctggatctctggcgccctggaacttcgttgtccttgatcttttgccgatcccccgcttaaccggaagtagaatatcgatcaactatcgacgaggactgaccccgcttcccaggacgacagggcgtaacaaaccagccatctctcagaaatggcatgggataccactttgagaagatcgacgacagccatagacatcttcaggcaagagtcatactctctagtcttcgctgttgctgtaacaattcttgcgcattcacctgctgaacagtcatcctcttgacctcgtcgtcgacaatacctcataaccgctcgtcgcgctcatcgacattatcgctgggatttgaagatataagtacgcctcgatagccaatctccaccaacaaccggtctgccatcggccgtgcctcattcctcgtccccatgtcaactccgacgtcagccagagactcggctggctctgcggcttctgggttgggcatcgccaacatcgatctcccctccaaatcgtcccacaacagcgccgaatccatcccccacgtcaatgctagccccagtgtaccctacaaccataccctcaatcataatcgctcagatacggcctcgtccttcagcgactatcgaccggcatatagtaaccccagtccaaggacgcgattacgacgacccaagagcgtcaatgaactgggaaactcgttcaacagccgggccagtcagaggagccggtccggtctgaacggttcaggttcggccagagattatcggcctatcgaagacaatcatgtagagtttggagaacgatacgatcctaccctaccttttgctcctggaggctcagcagatggtccgggaaatggaaacgccggaggtccttcttccaggccagattttaacaggttcaggtcggactacccacctttgtccaggttctcgcctcctacgccttcgatcgacccgggaaaccataacaaacagctcgcgaaccccggtggagggaggtatcaactcaccaccggtctaccatggaaggctggacccgtacatacgcccaaccccgccgcgggacaagggccatctttccagccggcaccccgtcgacccctaggaccaggagtcgcgatccccgcatcaggtggaagcaccccttatatctccgtcatggaaccctcttattccacccggacgttcggctcggccgtcttccccccgcgtgcagaaggaccgaggaaacgagcgctgagcgagggggaatgtcaactcgtccgtcaggggaccctcctgaccccgcacgccaattcgaaacgcgcttctgccgaactcggggtcatgctcggcaactcgtctcaaaaggccaacaagagcaaactcctgccccagggggaactcccgatcgaggaaaagctcgccaaactggatcaggtcaagttggaggccaagcgggggagaagggcgagagtagaggtggacgttgtcctcgagagcgagacgttcgtcgagggaggagagttgaggggaagattagaggtcaggatccggaggggaagaaagggagagaccttgtggatcggtggagggaaagtcagggtgtgtgggtacgaaggtgagtcccggcgggtaaacaaccaatgtctgaaatgaaagcgcttttctgaccctgagtacctttcgttcgctctgatctcagaacacgcacacaccgcaactcgacatatattttatcattacccacatcaactcccgctctttacacccggtaacgacgagtaccatccgatctttgcttcgccgcccaacgaggatggatacaggtaagcctcgcatgctgctatgttgtaccgaccggtagctgatcgctggaaacgaccatggctccaggatggcacgggagggagtccacatcattccgttctcggtcaggttgccgttgggaggaggcgccaaagggggatggtctggcagcgtgcactcaggcgtacgatatgtcgtagttgggtaagtcctccagcttgtaagactttgttgcggcgaccttcacagctcacctccgtatcctgttgacgtgccagctcgatcaaattgcacacgcctgagacgaaaaagagggcgatcgcgcatttctatcggccttgcacgatctacccttatatcgaacctggattcgtattcaacagcacatctggtgcagccgaggttcatacggaacaaggtcttggatggtcgttatctggcgacaaggggcaggttcaagtcagtctcaagctaccccgcccgaattggatcgcaggacaacaggtctggctggacatcaccgtcaacaacaagagcagtagaaagatcaaggcgatgaccctggcgttgctgaggaccgtgaccttgttcactccgccagcgactaacagcaagcagccgacgctctctccagatctagccaagtattcagggaggagcaacaggaaaaagttatacgagcacacgaccgaggcgagcgccggacccggatcgggctatgttgggtcgaccggttggtggactggggtacagcctggcgagaggatccgctggcaatcgagtctagcattaccagtcagtcgttccgggtatgatcgtgtctatttatcccggatctgaccgaccgtctcgcgtcaggctgaatgtttgaccatcgtccgatcgcgcctcatcgacgtttcatacgccatcagactcacgctcaacggatccgtccacctcgacgtccccgtcactatcctcaattaccagtccatcgatcctcctcccacctgcgcgttctcagccggtctccctcggtcgtatgaactgcccgtcgagcacgatggctttgtggaatcggagccctacgaaacgcaaatgcacacaccggcccattcccgtagaatggtcaactctggtccagctacgtattcgcaagatgaatatgccgatcttggcctgcaccaccctccgagaccgccccatttcccactggggcctccactccagatgcccgaaacacctgcagacagacgtcgacccttgtcgatggagagcggaatgcatgcgcatataaacaaggtttccttcgcgccgacgatgccgcctcttccaggtcatccgggtagtcagcgatcccgacccaactccatgtactcgatgggacggtctcagactacgcccgtgatgcgcccaggtgctagcagacgggacaccaccctgtcttacctctcggcggtcgcatcgatggaagaaggcgatcttgttcaaattgaagcccgtcgccgagctggacgacaagcgagtttggcagcgatcatgtatggacgcgacagtgacgaccaagaaatcatggtggatgaggaggatgtcaatgtgacgccttcgacggggacgtttgcccctcaaagcgcggcgctatcccatgaaggttcgccggacgatcgagaattatcagaggcccagcaagatctcgatttcgtaaaggcgacttcgactcctgaagccaacgcggcctacggattcccttcgccagcacaagtctctgcgaacccttcttcgagagactcagagtcgcgtttcttggaggaggaccttcaagatgagcacgcctatcgacgcagattcccaacagagcacgatcacgatccccttgataatagtgcatctggatcatcagccatcttgcggtcgcctctgcaccagcaagtcactccatcaacgatgagtcacagtgtctacgacgataccgaggaaggtgacgacgagcacattgacattggagaccgacgcgagcgttccactaccctgtcaacgcaaagcctcgaacaacacaatcagtctcaacccatgttgatgccgatgtcggatcgcacgcgacaggctcatatcggtgcgaccaggtcgatgtacgggtcctttgcagcctcggctgttagcgtcgctagcggaccagaatcggaaatcggccaggtcgtggaagcgatccgccgaaaccttaccatgcgaaactcgcccattcgtgccgatagtcctggaggcgaagcaaggagcgtggacacgctgccggaagttttgccaaacctaaggcgatacctcgatatcccgcgaagcaattctttgggtgtcctaccagagacgctcgaagccgttagccgacgaccatcggctcctgcttttagcactaggaggccctcgaattggtctggtatctctccaatcagccgcgtgtctcaagtagagccgtatggcggagtctggctcaattcaccataccgacaacatgcaaacgttcctgggaccggcaatctcgccatcgagcgcagcgtttctcccttgagacagcaaaccgcgcctggccttttgcctcacagtcctcagtcgagtgccagacaggcagtgccgtataatcaatcgccgcggaatgcccgacagactacccacccgtctggtcacgatgcgcctcggcccccaagcctcgctccgcccctcgagggttacgaacccgcccccggcctcgcaccctcggtagcaagtgactctgcctcgtcccaatcacatgacgatgagagagcagctacccccactcagaacaggtcgcagcttcctgatcgggattccagtggtccgttgactcctacacacgaggcagctcgtgaaggtctagaggtccgcatctggagggattccagttcttcagccacaacgagtaacccaaggcactcgctgaggagccctaagaggcttcggattcctagtgggccgcgtgaaaagccgagcatctcgcccaaatccccttaccggcctagatacccttcaacagaagaagaacctttaccccagaaccctgagaggctgactgtcaagatcccagaagtgccggcattgcccacgattgagggctcgcctaacaagtcgctcgctggatctggtcgattcgttcgatcgcctgtgaacatgtcacctcgctcagcatcccggtaccaggattacggacttgtcgagagactcggccaatcgcctggcaaagggcataccaactcctctcgacgggcctctccgatgagcctaagcgcgaaacagctcgagcgccaggcctctcaggcttcgatgcgaagtacaagtacgaccgctactcaactagagaccatgcttcttgagcgaaagggatcttcgtatgtgtttgagcatagcaagtatatgcaagactggactgggtaccacaaggctgctgcaccttaccggacgcccggtttggatggcgaggatgaggacgatactgagagtttgagtctcctctaaaaggtttattcagtcatcatcaatattctgcttgcacccttttgtatctatatgcatggtttcggattcgataaatataccttgggttgctcatgatcctcgcccgaccggactagtcgcgatcctcgcccttgttctgatcttcttagcctcaatagccagcttggcccattgcccgattccaagcccctctccatccgatcgagcctgagtatccagctctcggtccgaactctaagccttgccgtggtacctggcctaccggtatcaaatgcgaagggtgacctggatcgcgcatcacccccgcgtatctcatctccgccggaaacgggttcctcggatctgcattggcatagtcatgctgcgtcaagaacgtcgcttgttcttctggaggtaagcgggagatggctatcgcctggaagacccaatgaaacgtgaccccgttagaaagatgtcatctggctgaaggaataggctgtttcaggaacgcacctcaatctcggcctttttcttcctcccctccagccagatgaacgtagtcatggctccgaccaccgctagagcgcccaacgccgccaagaccgcgatcgtcttctgctcgccgggatcgaatgttcgagggacgactcagcgaaacgcgattacgacgggatcagattcgcgctccctaccttctgggtcgtactctcctgttgctcgtgtggcaattccccgggagtcctccagtccaggttcttcagcaatgtataggctggggtgggagccgtcggagattgcccttcgggcacggcaagcactttcagggtctgggtggcgaagaatgagtagaggccgaggtacggtagcgtgcaattctgggaggggtcgttcccgttctaggtattccgattgtcagtaagccctgtctcgaacgcccgaagtggccatcaactcgaatgggcttacgatcgtcggtctggcccacgtcgtgttaaccacgaacatatgccacccggtcatggcgaaggcgaaatcgaacgtcctcactcttggagcgaggtccacactgcaccacccggctccaggtgtgtcttccaattgggtatcgttgacgtgatcagctggatccgtggagagtgacgagtacggagggaagacggatgtggtatagttgggaaagttgatgagaggcgtgacttgtcggaggacgccatcttgggcttcgggtggtcccggggtaggatccacgaaaccgaacgtatagatgacacctggagcagatagagctacaggctcagcccaatccgatctcgaggcttaatgtctagaagcgactcttctttatcttgacttaccaacatagactggtaaatccgggttcggcatgatgaggccaatctgggcgggcgcggagatgtccggcaattcagccaaagaagtgatggtcgacgtgggcgtcgcatcgatcgtgggcgtttctgtctgctgtcgaaccctccacgactttactcgcacacatgagcacaaggtgatcaagatgagaagccagaatgacctcattatgctgtggacttcgctatcatggtccgtctccgtccaaagccgatcgtccgattatgatccaacgttcgaagaccttgcgtgttcagctgagtacgggaggctacgctatgcggaagatcgaaactaccacctataaagtggaactattcgaatgccaaagacgtctaggataagaggcaacaagagaggaaatcaatcgccgatcatcaaatttctccgtaaactttacaaaacttgcagacttgtttgttttttgtattcgattcgtcgtcatttccccgtgtttcagatcacacagtcatcaaaatggccaatttactcacgatcacgaaccgtctttaagcaccgcggaacacatccgtgatggtcatcacttgcaggtcgcgggcattatggctatggcgggcatcttggacccgtctcgaatgtacaaccggaaaaaatcgccctgaaagaccccgtcatccatacctgtcacgctgagctacatcatcgcgggacccccaggttgacggtcggggtcccggcagcacggtccttcagacattgatccacgtatgtcttgataccaggcaatgcagcgggcaaaacatccaagggtgatactccagctggtattgcaagcctcgcattaggtcggcgaaatcgcaaataagctctgacaacaacactcttaccagtctcctcgatctgtgttcgcaagcgcatcctcaacctcttgtcctccaagaccggatggtccgccggaagatatagccgagagtgctagatggaattcgagaacgagattagcggtgtttccggactactatgatggagagcacgaggctcacctctcggaaccatgctcgtctctggtcgttcgtgggatcgggcctcacaagagtattcataccaccaacctggatcaccgcagcgaccttatcctcgacctctgtctcgtccgtataagcatgagcagtctataacacggggtctgcaagggggggggattgtccggcgtacctctggtattgacaagcgacataatggaatcgcaacccgttccgaacccgaacaaaatgatgttcttacagtccgacagactgtacgggcaagatcaattcagccaaaggttcgcggccgggatcctataccgggttgcttacgagagatagttgtcccagatatacttcatcaattgaatccagggccgcggggcctgcttggtcacccacttctctcggaccggtggcatttgctttgcaaattcagaagccaagcatgagtcccttcacaaagtcgattcctcagggggcatttggcttacagaacgatagaccgggaaggcggcggttgtgttcacatcgatgatgctaaacttcttctccttcatccattcgatcacctgattactttgctcgacctagcgcaaaaggacatcgcgtatccttagttgcctaacaatggcaagttgcccggctcaggaatactcacaaggcgcgacttttcgaaatcaccgtccatcaccgacgtgtttcgaggctcgtgccaaaagttgccgcttgggacaaaggcaaagtccaatccgcaaaatcagctttttcgattcatttttgcatatcgcaaacgaggactcacaagtcgtgtacaaaaagtactactgtctttgcagagaaaagatcccggctagcacacggacggcccgtgagtccagaatccaatcaaagtcatggacgaggcttactccgttaggacttgatctgggaagagcctgtcaaggtctggattcgcgaggggtaccacgaacatcttgtgctgatcacacaggcgatgagcgcggtaatgttttaatacatctggaagaacaaggcgtcagccagagcatatcccgctcactcgccattctactcacctcgcaaatccacagcatcctcttctgattccttgaggactgcatcacaaaggcccagcgattggtcccagctcggcgagtgaatagacagacgcgaccactaaccatccagaggggcgctcctcttgcctcggagacactgccagtactgcgattgcattttcacaacctgatagattgtctcgtttcctagttgtgtcggtcgcatcggcggcatgagatccaggacgtcccctgtcaatgcacgggctacagcttcagccgaattcgaaatggcatcgaggttgtatccgccctgtaacatgattgatgagcgttggtctcgacagcgaaggcaaggccacccttacctcgagagcaacgacgaccttgcccccagcgaggcccattaacatatgcgtcatttgtgcatatgctcctggcgtgaccttacattcaccgagctcatcgccttctgctgcatcgaatccggcagagactgcaaacaacactaattaatcgaccgctctggaaattcaccccagcaattgcacaaggtaacaaaacatactgatgaccaggtcaggagcgaattcgtaaccgataggcatgacaacttcctggaaggcataaaagtagtctccatctccaaacccagcctgaggccatggaatgttgacagtcctagaacgtggtaagataagtcttgttgcccatacttcgtcgggagaagatcgattagggacttactttccctctcctgcacctacccctgttacatctagagctccgaaatcggagcaagggtaaaaccggcccccatcatgccggtgaattgatacgtatagcacgtttggatcctcaaaaaatgctctttgggttccattcccgtggtgaacgtccctatagaggcacatactttcaggagggatatcgcgacgagcgcttgttgccgtgcgtcagctcaccagtcgacgatcatgatcttcttgacgccatggtcacgctgcacggccttgacggccaccgcaacattattgagaaaacagaatcctagactcttgtcgggctccgcgtgatgccctggtggccgtacaaccgcgatagcgtttctgacgaccccccgcacgacagcttcgcaagcggagatgacacctccacacgacagcctcgaagccagagcggtctggttatttatgtagagcgagtcacgctcataatctgcccactcgtctctgatctgctcgtgcgacatgtctttgtgcgtcgccggcgttcagtcgaggtttcgtgcggcgatcacgagctgcatgcgggggcatcagacttacagaatgtcttctcaagctcttgccatacgtggtcagaatgcaccaacaacgcttgctcgggagtcgcttcaggacaaggtagatgtaccatttgtgataccagatttgcggccttcagcttggcgtaaatgtgcgagatacgtctaggctcttccggatgcgaagtcctataatcgtccatatcatcttgtatcgacggatcttgctctccgtcgcggctgtagtttatcggagcgtgtaacatcatttgcacgttatacacaattccagtcttcttcgatatggggaagtccgataaagaccgtgcatcgtgttgtaggccgttattggcgttgatgatgagcgagttctggttgaataagggcacattgggagagctcgtttcgccaacgttgttgtaggagacctcctgaaagatgtccttcgtgtatacggtactgattgccggagccagggtcacatcattgaccactcccggtgtcaagcgattgctctcgttgacatcatgcatgtcgatgtcatgcaggtcagtaccacttctggaatccatgttggggctaagacgcggtgttccggccgtgtcgtgtcctgctggctcggttaggcttcaatattgcagtacactgatgattagctaaccataagcctgtggctattctagatactgagcggtttcctggtcaatttgctagtaacaagaagcaactcatacaactcacatcatgtcaggaaccactcactctaagtgtcatttgtttaggatgtggccgacaattcggtttcacgtgatcaacaagtcctggacctaagcagttgaacttggtcgttgaccgacttcgacctttattcgtcacgccctttctcataacgacgattcaaagacttttggctcaagctgtctgctgccacgaaaaccggtttacaaccagacccgctaccatggtatgtgcagaatctaccgcttgcggcagcccagagtccggcgctgatctcattatacctcgatgaattccagtctatcaatatcacgactcagtcttccgtcagggagatcactaaaatggagaggattggtcagttggccatccctaactcgcctcgctcgatatgtactgatatgttatatcatctctcgtgcaggtgcccactctcacattcacgggctcggcctggacgacaacctcgaacctcgcatgtcttcccagggcatgatcggtcaaggtccagctcgaagggctgccggaatcatcctgaggatggtgcaagagggccgaattgcgggtcgatccattctgatggctgggcccccttcgacgggaaagaccgccatcgcgatgggaatggctcagactttgggcaaggacgtgccgttcgtgtctctcgccgcgagtgagatctacagcttggaggtgtgtctttctgtcgtcgtttcaaatgagggctgttgctgattactccactcttgttcgacctttgcagatgtcaaagactgaatccctcacgcaagccttccgacgggccattggtgtacgaataaaggaggagaccgagatcatcgagggagaggtcgtcgagatccaggtggaccgatcagtgacgggtgtaagtcttgcttaaagatggccattcaccagaaactcacgacgttgttctgtcctgcaactcccaggctaccaaaaccggacgactgaccttgaagacaacggacatggagactgtgtacgatctcggaaccaagatgatcgatcagctcacaaaagagaaggttctggctggagatgtcgtccagatcgacaaggcttcagggaggatcatcaagcttggaaggagctacggacgagcgagggactatgatgccctgggcgcagacgtgagctcgagtggaccttgaaacaacccaatctgtcgatgctgatcacaatcctttcctcatagaccaaattcgtacaatgccctgacggagaattacagacgaggaaggaggtgcagcacaccgtctcgctgcacgagatcgatgtaatcaacagcaagagccagggattcctcgccttgtttgctggtaagtcgcattgtcctgcatccatatgcatagctacatgcattgactcgcaatctctatgctgcaggtgacactggtgagatcaagcctgagctgcgagaacagatcaacagcaaggtgtcggagtggcgagaagagggcaaggctgagatcgtaccaggggtgagccgtgctaaagacgatcgcggtaagacaaagcctaatgctttactgcttttccaacaggtactgttcattgacgaggttcacatgctcgatatcgagtgcttctccttcttgaaccgagctctcgaatcagaactggctcctttggtcgtcatggcttcgaaccgagggatgacgcagatcagggggaccaagtaccagtccccgcacggcatccccttggacctgttggaccgagtattaatcatcagcacccagaaatactcggacgaggacatcaaggagatcatccgagtccggtaagcatacgtctgttcttgtcctacgttgctttaagtctcgttgctgatgcatcctgtttcctgccaaatatagagccaccgaggaggacgttaccttcgacgacgacgctctcgagtccttgaccgtgatcggagccaccgcttctctacgatatgctctgaacctgatcgctcctagctcgctctcggcttcgcgaagaaaggtcacctcggtcgcggtcgaagacgtgcggaacgcctttaggctgttcgcagacacgcggaggtctctacaatttatcgaggagcagcaagatttgatgatgttcgggaccaagacgatgaatgggacgagcgctgtgcctgccgtggccacggaagcgatgcagaccgattgatatagtatcgcatagcatcggtccaaaatgccttgacaggtgtctttgttgtagcccgtacaaagagttgcggagatgggatttcctaaacgaaaagctgaacttgttctgtcacaatctcggagtcgtgtgacatggattccccagaggcacagcgaagctgacaattgagtctactctcctatgaaaggaagtgcaaagaagacaagataagagatatgatgtcatctgtatggctcaaaatgtagatgacttctgcatgccggccggaaacgaggaaaaagccagaagacactgggatgttctcgagattaccatttgggggccgaatgctggtcctgccggagattgaaggggtttgagacgattgcgtgatttgtatcttgttttgatgcgttgttaattcggtctggcatgccggggtcagccgcgaactttgcttatctctgcctctgccgagctgcctgcaagctgcatgcctgttgcttggaagtttcatcatatctcggcttccgctccaatatccgccaggacccacagaaggtcgaagcgagaaatcacgtaacatgtgacacgcgagcgaaaggagggtcgatcctgctacggtcaggacgacagagaccgctcgcattccagggtccggaatagggacaggcagaggactagaggactggtaaaccttgtttcgcattgatgcgcgcgcgtcgatcgtgtcgccacgataatcgcactttttaagcttttgatgggatgtcaaacggatcaaaaagacgaccagctccttcctcgcaagctcaaattcagattagtctgaagactcaagttcaacgatgccaggtggtccatactgccagaagtgtcggagaaatcccgctggtttggcacatatcccctccggccgcgatgtaatcgatcaagcatgatctaatcatcactcatcactcatcactgatgatggcgcgttgtttttggggggtccgatccacttgatattcgttcactgattcacacagttcgaaacccttgtttttcacccttcggtgagtcagctttcttctccttcttgggcctcatgctgctcttgcccgaatgagcgattccacccgtgcgaaaacatcgattcccttctcgtcatcaacagggggaaaaaactcattccatcaacaacaagtacctttaccatacacttcgacctcgatacgtactcgacagcacaacattcttttaagacaacttttctacctcatcccttctctttttggtaagactcgtctcgaccctgcagccatattcacaggtctctgacgtcccccactgttccagcgctcatagattagagaacagccaaaaacttatctttcgcgctccagaatccccatcagaacgaacctttcctccagacaagatgcttttcacgtctaccgccatttccgccttgctggctcttcctttggccatcgccgttccttctcccgtggccaactcctctaccttggtcacccgagctgacaatatcttacatgctcgaggttctctgggaggcaaggctcctggcggcggaaaggacaacgtcgtctgcggtaccatcgcggtgaactggcagaagtatatctgcgcttgttacgatctaggagaggacacttgttaccgcgcggactccaagaaggaagacaacatcgtcgaagatgatggtttgatcagcacggtcattagacaggtatgtagcttggtcggtattcgctcgttcggacctcctttgggccctgatgtttggttcttgttggttgacagcttgagggaaacgctcaactctgttaccttcctaaacacgccaaacccgacttcaagaagggctgctgtatctacagtgagatgaggactgttcagaatgttgtctcttacaagcctctccgattgattcatactctgacggtttactgcagagtgcaaaaagggctacaaggattgtggaaacaagtgtgtcaagaaggaaaagccttgtcccactgccaagcctggtggtcacctcggcggtggcaaagaccacaagcgtaacctcgtatctcaacaatgcgctgccggtgagtctgccggtgtgacgtcccggaatgcttgaaatagtttctggacgcatctccttccgttccgttaggctttaccgcttgtcccgtctcttctggtaccgggttcgaatgcttggacgtgaagaaggatatcgagagttgtaagtaggcgcgctatcaatgtcgcggcaagtgtcccttacatttcggtggcgctataggtggaggatgtcttcagacagtcaacgcggggatccaggacgtcgggcaggattgcaccagcattgtacgtcgagctccctcgccggtcacttcaggccagctcatgttccgtacgggtgatctgacttctcgctctgtagcgctacgtcggcgatgtcagctgcgtcgctggtcaatgccagatccaaagctgcacttccggcttcaaactcagttccactggagacaagtgcctttattctcgagaggcctactcccagcagcaaaaatacaggctctgaaacggcttttgcgcgactcaagctacgtcatagatcgatcgatccagccgttccgacatcggcacgcgcctcttttcaggttcaatggactttgcctcttctccttctcggtagtcttgggtacggtaacgtgtgacacgaatggcggatggacgacaggctagtgtgtgacgaacggacgattactgtcctatctcttttccctctcaaaacggtctttaccttcccctctcaaaacccttctatatagattctctgtctgtagatggtccggcatcgatgcgccgaaagcgttcggactctatatacaatcgttacgtcgtctccatctttttccggggaacaaccagtcacatgccgctctcgtacggtttgacgttacgcattctgttacagccctagtacgaatatgtgcagtggtgattttcaagagatcgatcggtctctttcgttcgagggaaaagatgggatgattgtctcgattgtgtcccacgaatgagatggatgtggttccaaagataagcttgcagtgagggctagcctgaatcgtaaagctgtgcgcatcgaccacgctcacgccgacacaaaccctcacttccttgccccaccctcatcttcagcccgcatgcgctgcacaggctctgctaatacgctatgtcgacttgattatgaagtatcttgatcttgatgcagcttgccatcacgtacggtgaacattacatatacgcagtgtgttatacaaattatattacagatcgtcatctcgccgtctcttgacttcgatgacgatcgatcaattatctttgtagatccgtcggacttcggacccctttcatcccgtccgcaatgcatttcccggatggtgtcgcgggctctatccccatggtcatcgctgtagctgagtattcacgtatgcctggacctccttcaagacggcttgccgtacgtccggagggagggtgtctatccggtccgaaggcgcgggactgggtcagcctgattcggacgcccgtgtacgtttgggctagtcgctcacctgaagcgaaggtctgtacgctatcctggagactatcgaaatttaggggattttgggtgtttgccgtctctaatcagggtggcaaacgtcgggtatcagtgatcgagcagttacgacgggaccgtcagaggccaagtcacctttggcgtgattcatcacctggtcgacccagcccatctcgttcagcttggtttgtaatgatctctgtatcctatggcacgaaaaatttgtcggtgagtatggaccatgtttgtgcggctcggcagtaaaagtaaggacgagctagactgaccgggtccattcgccgctcctgatcatacggtcctgcagctggtcctgaatctgctcgagctcttctgccgatgtggaactcatgtcgactgtttgacggtgaccgggggatctcgagcttatatatactataggctaacgacgagtgtggcttgtgccgaaagctatgagtcggctcagcttgtgattacctagattggacttagggatttaaccccctatcctttatgagcttcgctgtaaagatccgatcggtcccgacgtcgttgcccgatcacgtaaatctcgccgagggacgttgacgtcgagcgtttgttgattttgtgtggccgaaattagaaaatgaatattcgttcttggaataagtatcgctcactcgagaaagtccggtacagtcctagatgctagatactagatgctcgatggtatgaggtatgacgaacagctagtcacgccgtcatacacctctcgacttgcgctcataccccccagcaacagacacagggacaatccatctgcaagatgaacctcaggtcgtcaatcggaagcctgagctcatcgaccggtagacatcttgtccggcgacgcttcgcatcaactgtatccgccggtctactgaaagagctcgagaacaggggctttgtcgctgccacgacgaggtcggtcgtagcttgaaccgatggaaaagatattgaagctgataccagtgactcgaatccgcagtcctggactcgagaaacagctcgaagtcaactcgactggagtctacgtcggcttcgacccgtccgcaagctcgctccatgtgggcaacctcctccctctactctgcttactgcatttcaagcaggcgggacatcatgctctggcactagtgaggacgaattgcaacctcggggtcagaccccacatcgatcgtctttactgaggaaacgtttgcgacgtcagataggtggagcgacgggattcatcggggatccttcaggccgatcgaccgaacgtaaagcgttggatccgtcccagctcgaacacaacgtgcgaggcatcaccgctcaagtgaaccgattcttcgagcgcggtcagatgtacgcaagcaagcggcggagaggacaggctgatagaggacggttggacatcctgaacaacctggattggaccggtcagatcacgctgctagatttcttgaagggggtagggaagagatcgaaagtaaatgcaatgttggcgagggacaggtgtgtaagccaaatctcctttgttcatccaatttcgggatcgctaagcatcagaaacgactcgtcctcgatcttcagcgtcaagaatcgattatcgtccgagcaagggatctcgttcactgaattcagttaccaactcctgcaggcccacgatttcaaagtcttgcacgatcgatacaattgcaagcttcaacttggcgggtccgatcagtggggcaacatcgtctcggggatcgacatgatcaggcggatgaagaacgcagaaaacgacgatacggacgaggcggacccccatcggctaaaggaggaactcgcattcggattgacgattccgctgttgacgacgagttcgggagaaaagtttggaaagagcgcagggaacgcggtttggctcgacgagcagatgactagcgtctttgatttctaccaagtgagctcgttcgtttgaaagagatcgacgcgatcatcgagctaatcggtttgccttgatgatctagtactttttgcggtcaagcgacgcggacgtcccaaagctgctccgcttgttcacgttccttggcttggaggaaattcaagaggttgtgcagcaacatcaggtgcgctctcgcgatcgacgagaattttgcatgggaacaactactgaaactgcatccctaactgtagcataacccagccggccggatcggacaaaagagattggcggccgaggtgacagagctcgtgcatggaggtacgtattcagtcgcgaagtcatggtctaccatcaacctcggctgactctagccaaccttccaccacagctgtcaacctcgcaaaagctcagacggccacgtcggtcttgttcgattctgacctgagcaggctcgagccagacgacgtcttgtccgctttcgacggtgataaacggttggtaaagcttgccaatgacgatctgggacagcctctgagccgactggcggtacaatccaagttggtcaagagccgaggtcagtaggaccatcccccgtctgcgtcccccccccccctcgaggcgaatcaacctgacgagaagctgaatcgaactgaatcgtgatatctcgcaggggaagccaaccgggcaatgtcatcgggtgggttctatctgaatggcaaaaagatcaccgactcgcaaacgacacttggccggaccgacctgatctcggacaggttctgcgtattgggagtgggcaagagcgagaagaagatcttgttcttgcagtaaaaggacatctcatcatcccgacgcgtgcgtggcatcaaatatgcatatgaaaggcttctagatggggtatacggagatgcagacatcatgggtcgtaatcggtcgtgaaaaaagaaaaagagttcgtgaggtcggctccatccgtggtcgagggtttttccttgttggagctcgtcctatcaaccagggacgaggaacccgatcatgcagttgtcgagcataaagtcgacattgacccaagcgtgcgtgagcactgcggtatcacgagaggatgaaacccaacggtacgaatcgatcagtcgacgtgtccaccgcctcgacccgaacacctcggtacaccgagcggactcactgaacaacctcgtgccatccctcccggcgacccgcatcaattctttttccccacccggatgaaacctagcatactctgacatgttgtaaaccttgccattaaagacggaccacgcgtcgcccgtcttgttgtgtttcttgagttcgtccatggtcaccctcatgtacccgaaattcccagcggtggcgcctcccgtcccacggagatctttcccactggatttgagcttggcccagtccagcggggaacaaccgggggcgagagcgactttttgacgtttcttgatggcggggttcggtctcgtcgtcgtggtaggcgggagcgggagggtaggagtcgtcgaggggagtgaacgcgggttggcacgcggggtagaagggccctcgtcctcgtcctcgtcctcatcctcgtcgggttcaggctcgtcgatttcgaacgtcgggacgggggggtccgtcgtcgtcgtcgccgtcgtcttggcgcgagatcgttgtgctgaatcagggagtgggaattggggtggagcgtcctcgtccgtcgagtcgtcacgtccgaactggtcatcggagatcatcttttcagacaaacccgacgtcgttgtactcggtcccggtgatgacaaccacgatggtaaagaaggaatgagctgtgcatagggagagacgagtggcgagatttcgatcgatcggcaagtatgtcgttgtgagtgtgtatcctgctcgaggcatcgacccggtcactcacgaaggacatgttttatcgtcaaggatgatgaactcgatcctcgaactgatagggaatgactgctgcttgtgatgcttcacgatacgagcagagtagtttgggatggtacgaggacgaatctcaagtgttgcatctctctgtctagctatattatcatcccggtagatctgttctaccgggaatggatgccttttgatgaaagcggacatagacatgtttttgttgtttcaactaagccccgcgcgcgagttgatgacgatgactagtagtagtaactagtagatctctagtttatgatgtccgctccttggcttcatctgactagctagcctacactaaccactactactctacattacaacgacactcatctctaacctaggtccagatcaccgtcaaccctcaccatcgcctactacaatctcgagctggctcttgttatccggggtgtaccatgtccggacctcagaaccctcctgccaacgggccgaacgggccaggaggtcccgctcaaccaaagggcaacccggacaacgctcaacagcagcaacagcaacaagtacagatgcaacaacagcaacagctagctcaattcgaagctagacctctgtcagccaacgagcaagctctcggagctctcgaacgtacgggatataaaaagggagccgacacgctcaaggcgtccatcctgcaacaaaagatgaatccacgggccgagctcgacgttcccggacccggtcctggtcctggtcctggtcccggtcaggcctctcaacccactcagggtacgaaaaaggactcgaaccccgctcaagccaacccgtcggcccaaccatcgaaccaacctcagtccatccgatcacaccctctccctgacaatgcttcgttggacgagatgctcaaacgcaacatcccccaagcgttctcggcgagctcgtccaccgtcagttacaacatcaccccagagttcatgcaacaggccgagaacgtcgtggctatgcatttggaaaaggttcaaaggaaccagagcattgccgccggcgctgcaaagtcggagatcacgctgctggattcgatggaacggataaagggttacgtcaagctcagacaatgggtcgagtccggtttagagggctggaaggtgagtcacaagccgcgcgacgcttgaaagctcgtttcctggcgtcggcattcagatcgggtgagttgaccacgacggccaatcggttcgtcttttcgtttcggtcgggatatcagcccgaactccgggaagtcttgttccccgtgttcgtgcatacctttctcgacctggtagagaccgcacagagcgccggtaagtacatcgactctctcttcccttctcttccacacagtcgcgatccagagctttgcatcgacttcaagctgacgatacggtactgaccgtgctccagccatggactttttcaagaatcacgccgaacaccatttggtcctccatcgacaagagttggaactcttgaaatccatcaactcgcccgcacatgccttgatcaaccctttcgtcctccgattacggtgagccacgagaccgggatggggtaggctgcgcgcggcgtggtattgagtctcgccaccctatcgcagcaaggaacggtatatggtcaacctctcaaaatcggcgttcgggttacttttggggtggctgtctgatatcgggttggaatccttatgggacgtcccgaaagatacggggaggtacaaggaggccgtcaggcatatcatccatgcccgtctagagctgcagagtgagtctggtccgtcccggatctctgcattcagtcagacgcccgatgttcactcgtccgacgcgacggtaccatatcagtcacggagagctcgaccccgttgcccatgcccgagaccattgcgaagaacgggcttgtcggcgggatcgtcccaggagcgggaagcgtcgaagcgttcaacgcaaaggaacccgtcagactcgggttacccgcccctggagtgacactggccaaacataccgagatcgaattggacaagctgaaaaaggccgacgagaagcaggagacgaaacctcttccagagagggcgttgggcgatggagatgtcgagatgaaggatcagacggcgatgacggacgctgcggccggcgaacccgagcaagactcgtcagcagtcaatggggccgaaaaggacgacctgctcgtcaccgcactcgaacccatcggacgtggggacgtgctcggtttcggttccgcagggaatttcgccagtatcgatctggcgaaagaggtcaaggccgtcaccgacgcgaggaaaaagatcaagctcggagacaaggcgatggtccccagacccgagggcaactacgtacggcagcccagcctaccgagcgcttgctgttataccatttttgacggcggcgaagggtacgtttttagcaaacgatcagctcgtataccgaaactaagcgtggatcttgacactggaattttttcttttgcccgctaggaccacttccactgccatctcggaagacgcttcctacctggctgccggctctgccgagagtgtgatcaggctatggtccctgaagggcgagaatctcaagacccgggaatatgggtatgcgaccaagattgcacagggtggaggtgaggctgaatcgacttacgtccgcgagtaaaagtcgagctgacggcaaaccgcacacgtcagaatcgacaccgagtagtgacccaggtcaacccgtccgaaagcttgtcgggcattctgggccggtctattcattggcctttgacccaatcgccgggtccgcgtccgccccatctcacctcttgtcgtcgtcacaagacggtaccgtccgtctctggtcgacagacacgttcaagaacctggccgtttacaaaggtcacgcggatccggtctgggctgtcgaatggggacctcatggcgcgcaattcgcgacggcaagcagggaccgtaccgcgaggctgtggatcaccgatcgcgtcgctccggtgcgaatgtttgcgggtcatctgtccgacgttgacgtcagtagaaccagcatctggatcaattcttggcactgatcttatattcacctcgaactccagtgcttgaagttccatcctaattcgctatacctggcgaccgggtcctctgacaaaacgtgtcgactgtgggacattcagcgaggagagtgtgtgagggtgttcatgggtcacgacgacgcggtcaactgtcttgccattagccccgacggccggtatctggccagtgctggtgagtcgtgtgtgtatacagaagcttacgacgacagctcacactgccccctttcgacaggacaagacaagtctatcaaactttgggacttgttctacggccgaatgatcaagtcgatgacgggacacacacaacccatccattcgttatcgttcagcgccgagtcatcagtgattatcagcggaagttcggattgtactgtgcgagtttgggatgccaagaccatgggaggcaaaaagacgggacctggggtgcaagatactacccaaacgtgagccaatagagagtctggcatctggcggtcgatattgacgatatcgtctcgaataccagatcggacctgctaacgacatattacacgaagagaacgccaatcacgaccacacattttacacctagaaatctttgcctcgttgcgggcacattcactgaagagcatgcatgagctgcatcgggccatacaccgggtttccccaggagtaattagaaagttgtacctccctcgaacactagaggatcacagtcatacgaaccaatcgtgctcgtcatcgtggtatcctcggcgtgaaacaccagatcgaatactccatcacactatattttacaggtaatagtttgtcgtcgtcgcatcgtcaaaactttaacagagaaagtatcccaaaaccaccgttgaaattcgaatcattaatttaccgcagagaaggaagcccccatgaccttaaagagccaccgtttcgtacttctcgtctttcagggtagacgacgtcttgatgagcgtggcatcgtcatccttcttgacgtcgagctcgaccgagttcctcgcctcataggcggtctcgatcttgtcctcggtggcccccgcaccgctcgaaatccgacgtagcacattctcgtccttgtccatttcctcctcaggggtctgcttgaccttttccaattcggccgactcctctgcttccctcttgacatcatccacggcggcatctttgggcttggcgccaaagaacgagaaccctcgtttcgctagccccggggcggattcaggctgaggacttgtcgcggtggcaggtgcgcctccggtgatccctcgactccaactggacacaaagttggatagcggcgtcgtcgacgaggcggacgacttcatccccgagctatcctgttgaccgatcctgagaggttcgaggtgaacgttcttgacgctcgaatctgcgctaggaatgtctcccgcctcggatctgattgaggtcgcgagcgaattggtcctagaaattcgatggatactgggggccgtcgtaatcgaggcagccgtggcaggagcagctccccacatgttgaatccccaaccagacttcttggccgacgccgccgacctcgccgcttcctgtgcagctagatcctcgtccgattctcggtccgtgggcaagggcggcaacttgattccctgtacgctcgacccctcgtctccgcccgtactaccgccgttctgcatggcgatgaattccctcagcgccttcagacactcttcactggccatcctcgcctcatgagcttcagcaagctggttcttgagcgctgtgacctgggaagtcaaggtcgccgtcatgttgtcgtcgtcgttcagattgacgtattgacgctgaggcgatcctaacccgccgttcccgcccgaaacgctcgagaggtcagagaccgacgtcagcgagctgagccgttctgcgatacccggtctgggacgagaagaggtcgaggctgctgacataggcacgtcgccgtaagcctcggcgagctgatgagtaggttggccgctaggactgagggtgagattgttggattgggatcgttgacgggggtccttgggtgtcaattctgggttctcggcaaactcggtcgaagcgttggtgggtgtgctggcattgttgttggtcttgggggaagaagagggagaggcggcactggcgatcgttccgagcctgagctcgcgcagacccgttcgggtgttggaagcgggcgcggttgacgactcggtcgtctcggcaggcggtccactgctgaccctcctagctccctggttgaagagcagactcgccctcttgacccgcttaccagtggtctcctcttgcgagccaaggtcgggggaaagcatgccttcgacgctcggtccacccgagcccaacccgagccctaagcccgagccatacccggtcgagctcatccgtttatcctctgctcccatcctcatggtcccgatagccttgcgagcgtcttcgaccttgccacgcaacatctctacgttttcctcggccgcttctcgtttacgtttctcctccttgagttccgtctcgaccgcctctttggcagcggagaggaacgtcttctgcgtctcgaggtcggtcaacttggagctcgtctcggcgagttcgccctcgagctcggcattgcgggattgtagacgagatgtctcggcttgagcggcgacgagtgagttgcggagttgagcaagggtttcgggcgaggtcatggcagggtcgaacgattgacgcttgttatcggtcgcatctgctttcacggtcggctcctcctttggcacggccggcgtgtccgcaaccgatgattgttcgtcctctttagcgtcctcctcggcattcttctcctcgtctacagtgtccgcgataatcggttgttgttgcacctcggggctggaaggtacggcttcatcagtagtgacggccgacatgatagtcgatcaagagatgacccctgcgatcagatggtcggatcgctatggcagtcgtgggtagatgccgccgccagtggactgtttcggtgacgtttgaaagcgatcggattctcgaacaagaccgatcgactagattcaaatgctaagagtcgaggatctcgatgtacattggctgatagtctgtcacatgtctggccatcaatatgatgattccccttgactttggactgatttgtgtgtcgatttgggattttttgattccgaaaaacgcgaaacgcgagttgcacaacgccaaaacacacatggacaggcaaacagaggcgaacgtagttatcctgctttgctccctatcggcatcctcacacaacgttgttgcaacatcccatggtccatccgaatcgttggctttacattgacattgttccatgcgtttccaaagtctcgaaacccattcatagagatcgcttcgaaatgagaccgaacggacacccccacgccggactttatgtatgccttatcgcgctgagcgtcttatctggttcctgcaaggccccatatccacgtctcacaactgagatccggacgattctcatcgccgcaatatcgtcattatattgtcgtcgtcatgatcatgatgggtatacagaatccccgtctagaagccgctctactcgaggtccatcgtgctcccctcgccgatcctcgacgccctctgatcttccacgtcactccccacctcgccctcactcgcatcctcatcgtcttccatactgacgctcatgttcatactcacgctcatggcggtattatcctcgtcggcttcgtcatactcggcggaatcatcctcgaccctcgtctcgcctccttcaccttcttcatcgctaacgtagtcttctttctcgtcgacatcttcgtcgagatcagagtgatcagacctagactgatcgcttcgatcgacgtcggcatcaacgacatcctggctccgagcgcgggcgtcctgcgcatctcttgctctcttcgcctgctcgcgccccgcttcgacctttgcggcttccgccaacttgccatagtttgggaaaggcgggagttgcaggaacctgttctgcccgatggcttggtgccccggatatgcggtccctgagaacatgccctccttggcctgctccccgaacgcgaacggatctaggtcgagatcgaccaacccgataggtaaaccatcgaattgacaagcaccctcgtccacttgttccttgagagccttttcgagcaggtacgtcgcgataggatccgtcgtctcgatcgccaacgcttggtgatatcgttcaatcgccgtcgtgacgtcgcccgcttcttgagccaacatccccaagctcgtcagagcggaaatattgagcgcgtttagcttgatcgcgtccgtgtaagctttggccgcgttggtcggtcgtctgtgcaagtttcacttcgtgagattgtcactatcgcagccaaacgctgggtggactcactctaaccggcgataggcgtgaccgaggttattgtacgtcacggcccagtcggaagcgaccccttgcatcttcttgctgcccttaatcgcagcctcgtaatgcttgacggccgattcgtaactggagccaccgtccaaagaatgatcagtcaccgccgttcgacacagcgtccatatagacttggtgctcactctccgcgattatatgcgcagactcccagttcgttcagcaacaacggatcggatgggttcatcttgtgtgccaattcgaagctctcctttgcgagctccaggttgttcaaatgaagatgctccatcccaatacagacgtggggaaagtaggaactagaagtcgccagatcattccgcgtcagccgctgcaccgaaacatggctttgatagacgacggctcacccagggaacagacgagccgtagtggagtacgccgtgatggcttgttcatgctccttttcgtaggcaaagcaatgcgcaaacgcaatccaggcgggtgcaaaccgggtatcctcgtcgtgcgtcgccctgcaaagcattgagggggtgatgagatgtatggacgtaagcgacgatggcccctgcgaaactcacgcaaagtaacgtctcgcttcggcatatcgctctccgagaaagtaccacagaccgacggcgtaccacgagatgggggaagtaggttcctgctcgacctgcttgtgggcgagcatgaacaaggacgaagataatcgagggatctgagcgagacatgccaggtgcaagggcagaccctgtgcgtgcccgggctcgttgacgatgatccggctcgttatcaggtaacattcctcgtacttgtacttggtaaacaagtcctcggcagcggcgacccaaatgtccgaattggtactgaggttatactcgtcggccagtttgcgccgggctatccggatctgtttcccatacatggtctggaacagtacggtgctatgaggccattgccggcttcctttgcggcactgctcggacttaccttgttcaaccgcgaggtgtataccaatttaacaaacgccgcatcctcttctgccagctgttcgcgatatgatagactctgaatgaaatcccattctgcggtattcatcagtcggagggttatcagcttgtccccgaagtcacttggcatcagcgagcgggcccaccttcttcgggcaacatcatctcgttgacaagctcgttgaaaacgtcgtaattcctcacatccagagagagcgcttccatgtaacactctttggccatctgaagcgagtttagtcgaagatataatacgccccggagcctgcacaacgaggcctccattttgagatcccccgtctcgcttcgaatcttggctccattcagacctatcgacagagacacacagtaagtctccacgaggttggcagccagacgagactagggaagacttgccggtcgcagaaaatggattcgattcgccgatcaatttgagcgcatcgttgaacctctcctgatgcacctgtgaatgtgcgcacccaccgacgcactacctcagtacgacgaatcttgcttgcccgatccgtctggcgttcgactcaccatacagagcgccgcaagatacttgcacggcatgctccattccgtcaaggcctccccgccgctcttctgcccaaaccctgtcctcctcgtctgtcccgcccgccccacgctattcagtgcgccccaaagtccgcccttggtgtttcgcatgagatcgcctatccacgtctggtcttcttgttcttcatcatcgtcgtcgtcttgctcttcatcctcgtcctcaccagcaccgacttttcgaaaaggtccgatcatgctaaactcctgtaaacccgggcgtgatttcccttttcccttcatatcgatgtgattgtccggttctacatctccaccggtgcctcccaatcgaggcatgcgggaaggaggtaatgagccggtgaggatcttttcagctcggaggtagtggcccatcaagaaatgagcctgtgccaaccaaaaggcgtcgttcggttcgcctgtaaccgagtcatggaaaggcagtatcgttaggacgagatcgttcgaaacacccacgaccgggaaccagggactcgcctgtccatgtgaaaatcttgtctccccagaaagaggccgtctcgtacaaatgctgatgaatggcatcgtgtctccacgtccgcatcctcgcgatcatctcccaactcggatccacgggagcccagtcgtcgtcatttcccccgtaatcgagtcggtcatcgtcgtcgtccatattcatcatgtcctcggcatccccaaagagttcgtcgacgttcaatcgggcgtgcgaatcgtccatgtacgaacccgggtccgagccctgtgtctgcggggtggaagggtgcggtcgccggatgggtgtagaggtggacgccggaaggaaactcggtccgtccatctgaatctgaggagatgacattgacggggacgaggatggcaaggggacagaagcggaagctcctaccccgtacgccttttcgctccccgtcgaatccatccgacccggtagccccggtcgacccaggttcctccccgtggcgagcctcaacaggtccgtccctcgctcactgttcctctccccgctcgccctccgatccctcaatcgaccggttaacatggctgccccgcccgctttattggcagtatggtggatgggcaagggagaatctcccgtccccgcgctagatattccgctggacgcatcgctataccggggtctcttcaagttgttggtatagttattgcgaggaaaggtagacatgtagccgttccggttgaccccgatgaccgacgagggtgaacccggtttaggagaaccgtgcggcgaggtcggggggaaggacgagtacgggccgaggagtttcggggagacgctcaagagacccgagttgccttgttccgcggcgaggttgaggagtacagcttgatccctgttgatccctccacgtagacgtcgaggtgaagaagctccaggtacatccaagcctcccgcaatgattcctgttgctctccgatcaggggtacgttcgtccatggacatgtcttcccccaagtgacctcccatccccgctcgttcttgctcggccgaggcctcgttcgcgatcacttgcaaccgcgacaacgagaggtcggccacgagatcgtgcggactcgaatttcccggtccgaatgagaatcgggacgccgtcgttgcgcttgtggagggtcggtaggacgatcgcagacggtagggacgggagtcgggattggagccattggacgagcctgtcggtgggatgaaccgggtatagtccgagtggatggcttgtggcggggtttgcatcgtggagaagatggcaataccacacagtcactacgtatcgaccttttccgaagcgggtatgatcaaggcggcgatttgcttatatacccgtcttcgtgatggttgatgttgatcaaaagagatcaagaagccaaggatgtcatgaacctctgtcaactgtgttgtgtgtgtgtttgttgacaaagtgataattgaaccgatatacggatcaaatcgaatatccattattacgtcagcagcatcgtcaataatgaatattcattttaagtcgattatattccggtaccaattcgtcatctccggcacaacaacttttgaaacggaaacatgacttgaagaacaagactccgaccatgcatgataggcctgaaaggtcatgcaattccatccctacaacgctcacgccagccgtacggtctacaactagttcaacggaactgcatcggacctccatcgaatggacgacgatatcgaagacatcttcgaggatggtctcttgagccttttcgaacatcatccggtcgcattctccacaccctccccctcgcatccttacatctaccgcccttcccccgtcccatttcccgacgggatgtcatcaaacacctcgactcacgatgatcaggaatcccgttcgatcctccccaatgtggaaatcccggtgtacctccccgtcgccccctcggcgctgcatacgacgttacaactcacgcacatctggttgagctcgatcttgatggccgacctcatcttctcgcgtcatatccccgtatgcgatctccggatctgtgaactaggcgcaggggcgggtttacccagcgttgcagcgttgttgaacgtcggacagaggcggggggatgtggctggatcggtcgtcgcgaccgactacgctgtaccggaacagaccccacaagaagccggtcaagctcaaccggaagacgtcctcggggtgctccgtgggaatctgaggaacgcctcagggatgacgctaccttgtgatatgggcaaactgacggatcactgggccgtggtagggcatacctggggcgaatccgtcgaccctatcctgtcttcccccgcatgtcactcgagccccccagaacgaggactagagcaagcacacgacgacaagttcgatctcctgctcctcgccgatctcctttggtcctcctcgtcgcacaccgacctcctcacctcggtccaggcactcctcaaacctcgaacaggggtcgcgcacgtcatcgctgggttacaccaaggtcggggcgcgaccgaacgtttcaagcgcgggtggaaggaaactggagggtggatcgaagaggtcgccgaggtccggtggggaaaagaagggtgggagaggtttgagaggagaagctcttcagaggtcgatcccgtcggagacgaggagaggggagtgatcgtctggttcaaggtcgggcgttgagtctgccccttggaagatacaaccgcccgctttgctggcaggcatgtcaagcggttcaaaggcctcatatcaggggtgaggcatctccatgccgacatccacttcgatgtgctgaaccacgagcgttgcgaacgggaccgcaacccgcgcagtctgccaatgcaaacccgttacagctcgcgtcgataccagtagaaatatcttcgaagccactgtaacgcttccgcctcgaacgagattgccactccctctacccgcatgtggattgtcacccgcacctcaatttccggctggacacactatcgacaggcaatcgaaacctttgcgagcgctactcgataaccctaatccaggcgaattggacagaacactttgtagacgcagataacgaacgccagtcgatttcgtagttgccacgatatacccatattagatttaacgtcccacccaatggatgactttgctagacaagacattcgccaaaaacggcttgtcgctcaaccttgtctgggtggaagatagccaatgatgccgccgctcaatttcatatccgagtcaagacatccacaccgtcctgtgtgacgagtagctgatgctcaaattgcgccgatctcgcgttggattcggtcgcatacgtccatccgtcaatccagccgtaacctcggctttgggttccttgcaccaggcaaggctcaatggtgaaacagtgtccaggctgcatgaggcctggtaggtcgttctctggaaggcgaaggtccggtgcatcagccaatatgaatacaaaatgctagaggagcatgggctcactatgatgcacgatccagggcgctgtgtgaaaccgctctccgataccgtgtctaaggcatcaactcggctcagtcctggtcaggagagctattcaaatcccttccgcttaccctgtaaattgccgatttaccgagaagccatgcttctctgcaaaggatctagggtacagatcgcagaaggctcagcggcttggtaaaaggacaatctctcgagggtactcactctatggccgtcccgatctcgctaaaagggacccctggtccgcatttccggatgcctacctcaagcgcctctcttgtgcactcgacgagctcttttccgagcgagtccagtgccggcagagcgaatgtccgggacgtatctccgtgcatccatacgggtagtgtgtcctcctcatcttcctcttcagggagagccgagtagactgtcacgtcgatgttgatcaggtcactctcttccagaggtcgactaagtggcagagggcagtgcgttaagattgcttcgccagtaataggcgcttcaagcgccgatcaccaggggcctacctactcgtccggtattccatctgctcgacctacatgtcagcgacacatatttggaaagggggggctacaacgaggtactcacggcatatcacattgttaacgcttgtcgtgatactcttcgagaatccttggtagccaagtggtgacggatacgcatcccttgccaagatcatgtcgtgtatcgctcggtcgagatcgctggtctttagtcctggctgttacggttcgactcagtgagctactacaaggcgcccgcatatcattccgatgaggcgcttaccttgataagcttcccagcatctcgcaggacctcgccagctatccgagcgacgtgtcttacggttcgctcttccacccctccaagggggatcatgccgacccctagtgaagactctccgaccccactgtccccccgccaaccctccaagtgatcaaattcgtcatctaccacgagcgcctcgtcctctgaaattcggctccaaaagttgactggaacataggacggtcggatgatcgaaagaggaaccggaagcggccgtacaaaagtcgcaggcttccgacccgctctggtccgggttggccgcaagacatcgtatcttccatgagaggtctcgcggatgggccgcaaaagatacttgcacggattcatgtaggtcactggggttccgaacacgacgaggtgatcaggtgtatatgcaatggtacacagggaagaccagctgaacacctaaggaatatgctgaactttacaaggttggatcacccaagggttgggtcgtcgacaaaatgcttccggtcgggaatgacgaaagatcatccgtttcggtcggttttgacaatccgtcaaaatgtaagcggttacattgtatatgttgtatgattgatcgctcgggcggctaggtacaactcgaaagaacctacaagggctagcgtgggaaagggtgaaaggctcgtcagaggtataggcttggctatgatttgctacttgggcagagtggaggacgagatcatactcgacccgtcagacggccccagaaggaagattgcgcgggttgagcgttttgcagtgtgttggattgggtgttgctgaaaaaatcatgcagttttaagagggtcagaacggatgtctcggactgaacgacgaagcatagcggtattctcactcttcaaaggctctcgagatgatatcggctggcaagtctgtgggtacgccatctgcatagcctgcgaggtggattgctcgaaagtcagaatcccagtgatcgatcggtcgatctagcaacatgtcgatcggggtaaaactcacgataaggatcgagtggcgcatagcctggtggaggtacatcgctcgccccgggacccatcacgccggaaaccagagcgtgcaagcgagcttgcaacccgtcctgacctgcagaagccaattgagccgaccgccttgcgtcccgtctctgccgcctcctctctcgcctcgctgcctcgtcctcttgcctggccgtctcgtcgctcgatccgctctccccgctggcttcttcgctagctcgaccgccgaaaaagtcgtttgaattggaatggccgtggaaagagtggagcgagatgtccagatgattgggtgtaggtggattatgaggcaagggcgatccaccgggggaggaagcacgtcgaagaccgcccggcatgagcccacgctgactcgatgctgtgctgctcgtttcatcttccgtatcagacgtgttcgatgacgctacttcatctgcacgaccttcttcgagcacgctcgcgtctgggaacgttcggttcagacggggctggtccgtgggggagtgatacctccctgcgcctgcctcgtttccccaacgtctccccaacctcgtgttcgcgctggtgctctctgttgcgaggttgcttcgagccggtagtgatgcttctctgagtggcgatggtaccacgggttgggacatgcccctcctgtgaccatgctgccaagcagccgccccgctcggaatcggtcgacctgtcgaggatgatgccgacgccgccgaggtggaagccgcgcctgccccggccgcttcgttcccaccacccgactgatttccatcgatcaacctcctcgcggcgctcagaacctctggcgtgatgctcctcgctcccggggttccataaccggcatccaagaggatactccccctctcgctcccgtaggctggcggaggcgccaacgtgcccatcatcggtgccagtccccatttcttgacgttggcttcgataaagacgaacccggcctgtccgagattgatgtgcactgtggccggaccgttggcgccgatggccgggaacaggttgagcgcggctagtccggtataacagtcgtccagctttttgccgttcctcgtgaaaaacatggtccccgtcctcggtctgtaccccacgccgagcacgtcaccctctgccaacggaggtccgtacgatgtcgaggtgaacgggtaattatggcacctgaacccgtcggacgagtggtaccccatggacaccttggcatgtccaggcatcctgaagctggggaacggcttggtcgcgaggccgacgacgacctctgtcgagctcggtttctcgtacatcttggcctcccagtaatacacctcgttgagcttgggtacgggcaggttggcgaggaccgtattcccgccgccttcacggatggccatgcccggtccgtccgagagaaaggtgatctcggtccgggactcgacgtagagtgaaggattggattcataatcaggttcgaaacaccaggctgagacgcccttttcctggatcgagaggaattgggagagggtgatgtcggtcgcgaccgatgagggtggatattgttgttgatagtctgttgcacggtcgtcgccactcgatcagtaccgtctttgcaagatgcttcctcgacaggtctgccaggattgactcacccttggctctcctgtacccctgtctttcgtcctcggaagcctcttccaaccacctcgactctactccagcgacacctccttcacccatgaccccgtcgttcctcatgacatccaacggaccaccatcatccaccaacctgcatcccatactcggatcagctccgatcatctgagaacacattgatacccagcccgacgaccgtgactcacctgacccggctcttcttcttgagcacgatcaacccgacgaggaacgccaggagcatgaacaacaacgtactcagcacgatcaggatggggagcaggatgtagaggacgggggaggcttgattggtccgtccgccattgttggacgagtcgggatcgggaaccaacatcctcgggggtgaagctgacgaggtgatccgaggtggggtgtatgacatgatggagagctgttcagatcgagctcggggtgggctgtgacgatcgtccccgggagactctctgcttggaaatatgtctgtggaaggggcgtaggcaggggggtctgatagggaagatcttggtttgcctgtcgtcctgagtgaccgaaaaagacacgcttcctatgtctgtgtctgtggcgatccgtcgatctctaatctcggtcccgtgttcaacaacgtcgctctctacgagcttcgagtcgacccgagtctcgtgtttgttcgtaagaataggtatcgctatgagtaccacccttttgcgactgaggatggggcacagggctgatgtttactggggatggcaaggggggtgtttgtgaaaggaggacggttccagagcgagtcgagtcgtagggggagtgcttcgtgattaggtccgaggtccgaggttgggttggatgtgggatgggatggatgctgcgtaatcgcgcgcgcgggggcagcaggggaaggcgagggagaggtgattgcgcgaatatagacggggtaggatggacaagcagatgaacaagtctgtcgtataccggttcagaagtcgatcacggatgagaggagaccttgggaaacggtctctcgatattgtgaccgctgacggtgcagaagcaggtccaggtggagcggtatgaatgcgctcctccacttctacctctacgtacatccgatcgtcgttcggtcgaagccgcgagcgagacattgacgccgatcgaccttcagacgaagcagaataaggaaacggtaatcaaaacctggaagcacggccagtctcgatctgaccatcgatcaccacagtatgagagaaggtatcaagcacgaatcgatctcgttataaaatctctgtgtgtgtgtgtggttagatgggcaggaattggctctgttgggggggtactgcacgttataagcacggtaaactcagctagcgatccctctacatttcatgcgatcgagcggggatttgattattttgataacacaaacttggtcaaatgacgtgtcatctcgacttcgccgaacggatcccccccttagctcgcctgcagatcgcagaacgaatcgagggccaatcccatcgaccagatttcaacaaatgcacgaataaccctctcaaagcacgcatcgaccgctcgaccccgcactcgttactcggaatcgaccttttatctacctcgatctagaccaaacctcgtcccctcgactcgttcgatctaacaagacactagtatttagcagacgataaaatggctttccgatccgtcctccctgcgctttcccgacgagccgtggtggctcagcctaccgtcctcgccgcgaggagcatctcaaactcgactgccaggcagagcgagaacttgttcgtcgtgagtgttcaatcaggtccgaaatttgccagacttttcggatcgtcacggtctgatccgagtgtcgtcgcgcttctttccgatcgggatggtttctagcaccgggataccgattacaacaaccccaacgtcagtccaccatccgattccacacctcggccatccctccctcgctcgtgctcttacaccccccgtacccccgtctacctacatagatccccttcaagttcaacgaagagaacgctaaaaaggtagagaccatcatctcccgctacccgccccagtaccgcaaggccgccgtcatccccgtgctcgacttggggcagaggcagaacggatggacctcgttgagcgtgatgaaccacgtggccgagatcttggagatgccaaggtgagtctgaggcggtacggggctcgtccctcgtatacgtagactcgttgaagggagggacggtaaactgatgggatgtggatctcgatcgtttttatagaatgcggtacgttaggggataatgatcgattcgatcgtaacgagtggtactgattgacccgaatccatccgttttcttcggatccgcattgttgacaatgacatagagtttacgaggtaagtcatcgacaacccggctggaacccccacgtgaaagtcgtagctcatcacatgtctcgtctttgctccaggtggcaaccttctacactgtacgccagatcaaatggcaatgctgtacctgatcgtttgatcaaagctgatcgccctgcaacgtttctgcttctctctctctctcctcgcgacttgaacccggcgtagatgtacaaccggtaagcccttatgtctatgacggacagacgatcgagacccccaaccgacttcgcctggacctgatttcgcaccccacagagaaccagtcggtaaacacttgatctcgttctgcggaacgacaccttgtcagctcggaggtgttggtgccaagaagatctgggactgtcagtcttatgaagtcggcttctttgctatgcactagctccgattggctgatgtacgatctcgacgttgcgtttagccatctcgggtcacttgggcggattgaagaacggagagacgaccaaggacggaaagttcaccctgatcgaggtcgagtgtctcggggcttgcagcaacgctcccagtaagttcttgccatacaacatccacgtcggaccttcaccccgacccgcgcatactgacgcgacctctgaatgatttccacagtgatccagatcaacgatgacttttacgaggacttgacccccgaatccactatcaagatcttggacgctctggctcgtggtgagacccccaagcctggtcctcagagcagcaggaagaccagcgagaacgcccagggaatgaccacgtaagtcgaacaccggccggccaaaagtgccgtccatccaatcggaatggttgcaagaagctgatacgatggtcgcattcggtccgacagcttgacgagcgctccctacggacccggagaattctgtcaacccgagttccagtagacgtacgactcgttataggggagcaaggagagaggagcggagtcagcgagcgcggagcgagcgcatgtctttgtattgaacgattcatcttaatggaaacgagctcgaaggttgacgtttcggcttgcatggtcttcatggcgtgacacttccagcttgagagtgctgtttctttccatcggaagcctctgaacgatagacgctgtgaggattgattggaggaaggctgcttgtagatggccgttttgtagattgaagcacaaacggtagcatccttgatgaacgatctgatatgctcgctgtccggaaatgacttttcgtccgtcatccggcagttgagacgctggcgcttgggaattagcgccaacaccatgatagtgagctggcgacatcttgcactaacctactattcgttgcagaggatatccggtttgtacgtgatgcaatgacggccagctctagactgctcaaaagggcatgagcgaacacacttcgatatttagaggtactagtcagtgagacgaaagagtggatcggcttttaggcgcacgaatcacattcagtttagcaacgaattgatcgatgtaccatacaggccgagcagtactttgactggcctgcaaggcaattattaccaacgcatggacaaggtgattgcatagggagaagtaggctggcgctgcaatcgagccgtgtgcaaatacttagcgatgcgtattggaataaagcttggtcaggcttctggatatgtaatacgcatgtagcaaaaaatgggcatcgtgggcagtattatgacaagagatgattgggtcgcgactgataggctgattcaactcttccacgcagtcgaccgtagccggcttaaaccgatctttcattgggcattgagagcggtctcctcgtcgtcgacgtccatcaaggccactgtcggcgcctcgacgtccccatccgccgtatcgtcatcgtcggactctgctcgcatctgcttgtgctcgccttgcaacggtgaagctgtcaaactatcccgctcctcccaagcgcgcttgtgacctcgatttgacatcgtcttgctttcggccttgaatttccttttgggaatgaccgtttcgaatgccaggcgccagtcctgacactcgttgtatttgatcatgatgtcaaagacttggttgaccgtcaatacctttcgcgtgggcatttctgcaatgtagcttccgatggggagtcgggcggtcttgatgcccaggcggtcggccttgtctcgacaaagattctgaaaggttatgtaaaatgagcaagctgtgtcacgaacagagccactatatgatcaactcaccttgtacctattcttgtcgacaattcctccgataatatacgtctcgtcctctttcagtgtttcgagttcgtaatcggagtcggctgtcaaatatatgtaggtctgacccgggaagggattcgagactacaccctcttgttgctcttcactaccccggaagaaaccgccgatatcctcccttctccattccgttcgagcccagatgttgtaatgagcttgtagagtagtgtccatcctttccttaagttgtccttggaaaccggaaaagacgaccttcaagaacggcttggtggtcaaccgattcgaggaatggcagtaggacagctgggaagccatcgatttgatttcctgacgagagaggtcaagacagtcagtatacttagcccttcgtcaatcgaatagttcccgctcactccaggttgcatgagctcgtcaaacgcgagatctatgacgagaccgcccttccaagcgtccttatccttggctcgacctccccgctgcttgactttaagcttgtcgatcctctctttctgcttttccaagtactcggcggcttcctcgggggtcatatttccagacttgaactcggctttctgagccaacttccttgccttgtttctctccttttcttccgctcgtcgagccaatttgccctcctccatcttggccaccttggcagcctttttcatcgcgttctttgacaacgggttcggagcgtcggtaccggcgggcaaggtagacgtcgaggcttcctgtacttttggctcttccggttgcgagatgttcaagtttgaacgcaggaaagcgggcagacggaggcgccaatcgtcctcgatctcttcctttgcagctgctacgaacggcgtctcttcgttcatggcggcttcctcctcgtcctcgacctggaccaagtccgatggttttacgcgcagatcgatgatctccttcttgtgcggttctggtcccatgtccacctgctctgaagctgcaggcgcggtcctgcccgagatcggcaggccgagacgtttggcgtcctcttccttttcgatgatcggaccgcgtttgggatcccagacgattccttcgatgccccagcggtaggcctgtcaagagagtacgtcgcctcgtcagcggctggtcctcttttagttacgggaccggtgccgagacacgtcttaccaagtacttcatgagcggcttgtctggataccggagcggatggtacctgatcaatcgatatactcgaaacaactgtcaagactgcctgactcaccattcggcatgacctttctccacgcgtcccctgaatcgtcacgggatgagacgtcgaccctttcggctcttttcctgattctaggttgttcctttccttccgcatcggcctcgtcggcggtcattccatcctctaaccaataagcctcatccctcggagctcccccgccgggtaacaggggcgaatagatggcgaaactatccatagcgtattgcccaactccggcgaaagggtaaattgactctcgttccaaaccgctcaaactggtcggcagactcttcttgggagacttggtgggagcgacgatcggggaccacgggaccggggtagcatcggacgcttcggtcttgccttcagggtggttgaagatggagtcgacgtattgacgcgaaaacaggatcaaccgggacgaccgggtatcacccagacctaagatggagatcatctcttccagctcggccttgtcagctgtagcccgagccatgcaatcgcgatttgagcatggtttggacacctctcgagatcaaagagcgatggagcttacccattcccaagtctcttggtgtaggccacttctcgaggatttgccaaaatatcggtcgagctgctcggccggtcgtcacattcaagagacaggtctacgggatgacatgaacgaatgtttgagcccagctcgagtctggcttgcacattgagcgcacactcacggcaacgagcatcttccatagatcatgacgaactcgctctgatattgtcgaacgatacacttggtgatcagcgcgtcgtagtcggatgggggaaggaagaacgaaccttgaatgagaagtggcttgagcagcatcccctgagcgatttcctcctcggtcagcactctggtcgattccgtctccttggaagtctgagcggatttggtatccttgattgtttcattctcgtccttcacgatttccggcttggctagacgcctgctccttctgggctgagcgggaacctcttcgatgaccgcctgggatgtcgagccggacaggtccgctgcttccggcttgacatcgagcggagcggtatcgacgtctttcaagtcggttgaaccggtaatctcctccttcatcttgattcggtttctataggtttgacaagagacactttgacactgtgctcagccgtacaattaccttgctcgaatcaaaagtgtaacccccgagaaagatgggatatgctcttgtgaccttgatcacgttcaatcacgtgatctcccaacatcttacggggtcgctcgcccggcttgaactccgatcgatgagggtccactaccaactttatgcaacatccactatggactatcaggtatcataacgctgccgccatacgtacaccgcaaagaccaccgcggatcacgctctataaccaccaacggaacattcactgcagccatgtccttcggtcgtccacccacaataggtgataccttcaagctcacgccgcctcaacgaggatctttccctctcgaccatgatggtgcgattgagacccagcgcttttgtcgctcaaccggaaggagactcacacggtagtgatttcttttgacccgtgacaggtgaatgcaaggaagtcatgaaggcgtacctgaagtgtttaaaagagaacgctagtaacaacgggaaatgtcgagccttgtcgaaagactacctcgaatgccgaatgtccaagtatgtggtggtcttcatcagagtggcccctggactcagtgctactcatcgctgactcctctgcgaggtcttgttagcaacttgatggagagggatgatttccacaatctcgggttaggcaacatcggaccaggcgcgaccgccccgccatcatcaaattcgaatgcgacgacagatcccaacgcggccacatcgtcatcgaccgcttcgtccacacccaaacgagctagtctacgatgaaggatctctcctctccagccttttagcgagcccgccaaggacggcgcaccattcagcaaatccccgttgtatccctcgaattacaccaccgcttacaacctcacgtgacatgacatcagcatagatcctggtcgtatctggttacctcgtcgtcgttctctaccaagcttgttctcgtcaagaccgactcaccatccaccatcgatgttccctttcattttggtggcgcgactcgggagacgccccgtgttttcaggtagtcgagatcaaggttacaacatatcgttgacaaggtcgacatcgtccaatgccgtcgtcaagacgacccggtatcgagatcgagatcgactgcatcaatctggactggtagaggggcttccctgttgcgaccgtaaattcgagcgttgtgaatctcgcccgccttgcttgaacccgatcagggtggacgtggtacattttgaacggttgtacagattatgaacgatacatcgatggagtatgctctgcttcttcacttctccagagctaggaaccttgcacactcgcagctcgacctcgacccgtcgccgctccggccccgttcaccccaggaccgtccgtctcggtcccgtccaacagtccggtctcttcgtccgcgtcctcctccccgtccaggttgggtacggtgacgaccctgcctgaccgggtccttcgatgacgacgagctttcctagggggtttccctcctgcccattctttgccggcctctgcgaacggacgatagagtcaagacggtgtcagtggacacatccgggggaccccgaggtcgagcttcgaaggcgcatgacttacgggcagcgagtccgacaaaggtcagagcgatcacgatgacgatactgatcaaggccgaggccacccctagatccgccgccgtgtctgttcggaaaaccagcgggatcacctctttatcagctccgtcggtcccctttttgcttgacgtggcactcaggcccttgcctcatgcatgcatgcgtcttgcgtgggcgctgagtctagactcacctagatgactcccgatcgagaacctcgcgtccgtcctatagacgtgcaagatgatggcgacggccacgatctgtagtacgctgtggatgctcatcagaccagaaacgatcttccatcctcctcgacgtctgatagctcgggtctttttcgaacctgttgcctccccccgaaaaagagaaaaaagagacgacgagggtgtggcaaggaccgagcgttgtcagcctagagatgtctttcagccgtgaacatgggatcgggactcgccagttccgatggtgatcaacaagagcgtgatcagggagaccaaacaagggaacaaggagagctgagcagcgtaccccgcggtagcccacatgatacctagacgtcaagccgccgcgtcgttcgatgagcgatcttgtactcgacctcgaggggatcccccgtaacaccgctggccagaggatggactcacagaacccttgacccagcgctttacattcagacctattcccgaggacgacccctatctcgatcagcccccgactcgatccgactcgactcgactccctggctggcaaaccctgacccgccccgcaacccagactcacccgttcgggaacggctggcacgtccatccatccccctccccgatcggtatatcccccggcccggccgtcaagaggcgtaatcgatccaggttgacgggcggggagatgtctagcgggtgtgagcgttcgaggaggacgagttcggattcggggatcctccggacgcagctgtaagtacgacgatgggatggacgatattatggggggttcaaggaatgtggtcaggcctgtatgaaatgaaaggacgacggaggcgagcgtgtcgattgggcgcttaccgcctatataacccatacctgcaagatgatcaccaccccccgagtaagaagcggaatcaacctcttgcctctctcctcacgacctagacagagcatccactcacttgacttcgtgttgtagtggtcccggagcgggctggatgacgtggatgaggctggggaggtagatggataggagggtgaaggataccgcggtcaagactgcgttgcgatgcggcgccaggcgtgtttcgtagcgaaacatgtgtcgagaggggagagtaagatgtgcatcgagatagacatagaggcattcatctcgtcagtggctggctcgacatgtgaataggatcggaggatgggcgaaacgctcccggggtactgacgcaagacgagcgcgatggggaatggagctttcctcactataggttgacagggcgagcgggtcggatatcagattacttgaagactaggatggtcggatacagcaaagaacgtactcttggtaactgtagcttgctgtgtaactttgggtgtttaatggtatgctgaagcgagtgttcaaagtgtgtatggctatggcatcatatggtttgaacctgaacctgaaccaccttggcggcggtctcaatcacaatcgtcatcacaaggagagagagagaaagacgcgcggacataggaaataggaatgggcagttcgttacgtaatgagatgtatgtccgcaacctccccttcaacttgcatcacgtgacctatacgccactcagtcttgccctccacccggacgagatttcgggaatttcgggtttgacctcgtgaaatggcaacaacatggttggtcaatccccaagcagagcaaccgaacagctcgaacagcgaccaggtctcattcaaaaaagaaaagaaaagatctactctgacgtcgtcttgagatcaagcagggtcatctctaatcactcgccatcgctaccgtcaccatgcctggcctctttcgtacgaacggcctcgtccgtgctcttccccggacgagctcgagcacgacctggcacgcctcaacacgcaccaccaccgctgcagtcgccacgctcatgttccgtcgaggcatggccaccccgtcgtccatcccccagactctcatcgaaaagatcgtccaggactatgctgtcgacttgcccgctggtaaaaaggtcaagagtggggattacgtgatgatcaggccggaacatgtgtgagtcgatccccgccgaagatcctcgaggttgacgtgcaaacagccgagactgaccgtgtccccgtctcttttttcgtcgatgactttgcttagcatgacgcatgacaacactggtcctgtcattagcaagtgagtctcgcccgcccgctcccccggtcgatcgacatgcaccccgcccgcggcaccagcttaccgaccgacctctgctccttcacaggttcacctcgctacaatgctccaaaatcctcaacccgcgtcaacccgtcttcaccctcgatcacgacgtccaaaacaaatcccctaccaacctggccaagtatgccaagattgaaaggtttgcctctacccacggggtagatttcttccctgccggtcgtggcatcggacatcagatcatggtcgaagaggggtacgcctggccgggcaagatggtcgtcgccagtgattcccattcgaaccattacggcggggtcgggtgtctcggtacggccatcgtcaggaccgacgctgcggggatctgggcgacgggcaagttctggtggcagatccccaagatcgtcaaggtcgagctcaagggacgattgagcccaggcgtgacgggcaaggacgtcatcgtcgccctcgctgggaatttcaacaaggacgaggtcttgaactgtgccatcgagtttgtaggcgagggggtccagcacctgtccatcgacgagaggttgacgatcgccaacatgacgaccgagtggggtgccgtggcgggtgtctttccgagggatgaaaagttgagggaatggtacgatgggatgatcaaaaagaaccaactccgtggattcatgaatgacaaccaggcggcgtcgtcgtcgttgtcatcgcccgatgcccatcctcgtctcaacgaaaagaggttggaacagacgttcgcgcaaaagttggcttccgatgccgaagcgctctattcgtctcacctcaccctcgacctgtcaaccttggtcccctacgtctctgggccgaacagcgtcaaggtggccaccgccctccctaggctcgaggaacaggacatcaagatccacaaggcttacctcgtctcgtgtacaaactcgagagcgtccgatatcaaggccgccgccgacgtcgtccgtgggaaaaagatcgccgagggtgtggaattctacatcgcagccgcttcgagcgtcgtgcaaaaggacgccgagctcgcaggggattggcaagccctcatcgacgccggatgcaagaccctcccagcggggtgtggaccttgtatcgggttgggcgtaggattgttggaaaagggtcaggtcgggatcagcgcgaccaacaggaactacaagggacgtatgggatcccccgaggcggtggcgtacctcgccagccccgccgtcgtcgccgcgagcgcgatcgccggcaagattgccggacccgactcgttggacaggtcgaccctgcccaagtatgacacgcccgtcttgacaaccgagtcgagtgccgcgcccgccgctgtagaacaagccgaagcgcccgtcgtttccaaggaggagttgatggcagggttccccgaggtgtttgacggaccgctcttgttcgcccctcaggataacttgacgacggatggaatgtacccgggcaaatatacctaccaggatgatattaccccagagaggcaggccgaggttgtcatgggtgagtgccgttggaggaggagcgctctgggtcatgcgctaacatttcgttcgggcaccggtcgctttcctacagaaaactacgatcccgaattcgccaacatcgccaagggcctgcgtccgaacggcaacgtcgacccttcgtcctcggtcagacccggtgccgtgctcgtctcgggttacaactttggaaccgggtcgtcacgagaacaggccgctaccgccatcaagtactcgggtattcccatcgtcatttgcggatcgtttggtgacatcttcaagcgaaacgctatcaacaacggtctcatctgcgtcgagtgccccgagctggtcagcgacctcaccgaacaatacgccaaggacggtcagcgtggccagggaggcaaggatggcaagctcaccatccagcccggttggaacgtccgcgtggacagcttgacgggcaagatcaccgtcacaactcaagaggccgacgggaaatcggacgaaaagatctacaaggccggagccatcggcaagagtgtgcaagagctctgggtcaatggcggtctggagggattcatcaaggcatcgctatagaaagatcgtgtagagccgggagctagcataccagagggtggatttagatgtatcggatgtacaagacatggttcgggcacgtctgatccgaagttgtaacacgcagatattatgcaaagatgggtcgaatcatacatatcgaggtcgtcaaagtcgttttaggtcgtgctgatatcctcgttccgtgtccatagactatcgtcgaatggagtcggagccttctctcacgctgccatgaggcgcccgatttgacgatcggtcatcgcgatgatacgagtcgttccgcctcgaatgctccctcttgacgtaaggcccaggacgccgggtcgtgtgcaacttggtcttccactctttaacattgcgaggcggtggcgaggcttttgtgtcgggtcgcttttgctcctggccttcagggtccaacttttctcgaacgagccgagccatctgttcccactttgcttgttcttgtggagaagttccagcctcggccatatggcttgcgtccaggacagcttcgagaatttcggccagccgttcgtatcgtcgtctacgccagaactgaacccgtcgctcgaccttttccgggtttcggggtttgatgccttcttcatcttcacgcatacgaccagcattgagagcccgatcgacggaatgaaaagcgagctcgtcgtctatcagctgcgtgcgctgcgccactatcaatgcgccctcctttagcatctcagaaaccctcagcgcttgcctcatgccagatagccgttggccatcgatggccgtctcgagcatcagcgtggccatttccaaggtcggcgaaacgcggcgagggatatctcggggaggcctagcttgtgacagctcaatcttggcgacaagatcgcggtgctgactgggctccccaccacgcgcatttgactcggtgtatgcttccggcaaaagcacatagtcttccatcaggtccaggaatcggtccatgtccttggtccatcgtgccgacctaaacaagtatgcataggtctggtatgaccatcgacgttgctcgtttctcgggccaaacgcttcgatcaaacgctggcacatgtggcagtcgtgggcatttgaaaaagccgccatcatcagctgccactgtctttgccgaaagcgagccagaatattgggtcggtcgaggaactgtttggcgaaatgggccgcatccaggttcttctgcataccgagacaaagcttcaagattgtttccgctgaccggtcgtctagctggaacgtcggcaaaacactctggttgtttgatcttgctacggccgattcgccgggtcgagacaggccgtataggtcaggtagaagcgtgagagcgagagcagcgtcctttgcagacccttcggataatgctcgaatgccgagaacggcgttctgctcatccagtactgcatgtactttgccgttgctctgctttgtgacctgatgttgctgcatcagtcgatcccagatttccctggcataggtattgctagtcttgtctatcgcagaactcgccgtatcctccgtgtcggcctttgtgtgggacttgcgtgccgctttcagcagcttgttgcggtcgaggagtgctttaaagatgactccgaaagtgatagcatcgggtgcgcacgcaccggatgtcggcatcgccctgaggaccctcatcatctcgtcgagcttgccaaaatgggccagaatttgcatgtactggttagacacgaattgggggtcttcaaaggcgtctggctcgcttttgagcgccccggctgagcggtttcgactaccttctggctgctgatcggcttcagcgagcttttgtagccctgcatccgggtatacctctttgtcttccttgacttgtagcttgttctggattactgtctgtgcctcgtcgtagataagcgtgtagcgggagagtaccttctcggcactctgctcaagggatttagggaagaaggtcaagagcgttgcccaagtcctggtagtaggtttgacattccgtttcttcatctaaagcaatggtttagtataccgagtagctcccgagatggcctgacgttcggcgactcacctcgttgtagagatcaaacatcttattgtaccgttttgcagctcctgcttgctttatcagcatgttccaaccgacagcattgatcgaccatttcggggcagccttgatgatgttctctaatttttcgaaccgttgatgctccacttcagcagcttgaggtgttcttgggatcggacggtttaagtacgactttatgaacatggctgtttgatacggatcatagtcgaaggggatcgaccgcagctcaagcggcgagtctagcaggcccgggcacgaccatcagcgaccctaggccccataaaattgcttcaaggaagacccactagctttcgtggttggaatcgtttttctggctaccggtgttcggctggttgctgatggtcggcctacatggcttgatccggaacgggtcagtcgaagtatcgaaccctcttgcagagtccgcacagtcctccaggctgggattggatggaacctaagcatgatacgttgcgatcaacgtaggttgggttctcatcgatggcgcttaggactcacaacaaggatatcattattgcacaacggttccgaccgagcaggaagatcatgtcaaaattatccgctgagcggaacgcccacggggcaatgtatgttttgctcagctgagtctgactccagacaccgagctgtagtgtagttggttatcacttttggttttgattcatttcgaagacgtccaaacgactccggttcgaatccgggcagctcgtttctttttgcccttgagcgcgagcaatacctggccgtgcaagcgcggaacgccccgagggcgacgacataaaacatacggacgatacagacaagcaagcggtccttgcgccgcgacttctgatgctgcgcagaacggtcacaaaagcagtgaataaggttgctgaagccagattctcgtaatcaaaatgcgagcggtatcgtttcgatgcacgcacgcttcgctacggcttcctaccccgcaagcgcgtcgttgagctctggctaagtaactagctggatactgcgccactttgcctttctcttattgacgatcaaggtctggtttcattgatgaaaatgacggttgttacttgggatgacgagatcgactggaagaaacgaaatgagctgattgtcttgcgaacgccatagagtcgtgcatacgagcaggtacaatagggctgttatccaaccttcctgtcaggcctatatcgttaccgcgagaagataagatgttgaccccgactgagatgcaccttccaggggttgcgcagtgtcgtcatacattcctgtcccccaacacgcagggaaacacaacgcgtttacctgcgcgttgttgcggacgtcagcttcaggtgtagaacatcaatatgcttcccttcatgtcgttggcttagcgtcgatctagtcgaagtcgtaactctcattgtagagcgaagaaggcgggaaggggtcctggctgaatgtaaacgtatctttctttatgctgctgggcgagttggctccctcacgcgttaacatgatgtcggtgtcagctaggaccgccaatggtattacaatatccctgtggatgtcaatagcgaacagctggaccataagtcgcaagagtattaaaaaatcgacggaccgctgcctttggctcctcgatgaggagggagcgttcgagttctggctcagctggctaggtacgatgagacacaggctacattttaacagcattaggcgcggctaggttccttttcataccgccaaccaaatttggactgtcagtctgaatcactcacgttaagctcgtgcgtggcctcccataaccagatcagtcgacccagagggcacatctgcttcgaatcgtggcaagggttgaatacgctgttgacattcttcttcgggcaagacgggctgagcgtggagttctctccccccttcaatacgttctgggtgctagaacatggagacgaaggcgagaccgcggtcagagacctcccttcctattcggcctctcctcttcggtccggcacctcccaccccttcgccatcacccattggagaaagaaggcgttttcctttccctccctctctcccgccccgaatccacccctcccgcctgtgcaccagcggtctagctggaaggatcatgttgagaggcactagcggtttgttcgccgaccatgttccgtcccattcaaggacgtcttgcgatttcgttacactatatcttatcaaagcacgaggtagagtcgatttacagacggggaagatacaacaggagacccaggagacgttctctcaagccgtcacctcggcggcaacaacctgctctaccccgttcggtgccttcgcgtcgtgactgctggccttgattagtctgagtaactcgttcctccgatgtctccagtatctgtccagcggaatgggctggtgtcagcaatcacggttccagagtcacctgcacaatcatgctcgatactcacgttcggcgcatgacatcccacttgtctgccagatcctgcaacaatgccgcggcgcgcttcagatcttgttctgaaccttcctgagcgagcgcatcggattcccattcgatcgcgcacgggacgggtttcggtcgggtttccgtgggcgaggtgtaagcttgcaggctaggcagggtttgggagaatggaatggaaaagtggttgtggagtccacggagataattccatgccgatgcattgtgagggatctgctcgatctgctgcaaggtatagctgcgaggtcgatattgtcattcgtcagtcatgggaaggacacgcgaggtgggagccgggggaccaccaccaccgcctcgacccctaccgccggaccttccaccaaagccgccgtacgacctctcggcagagacgtcgaccaaccaggcgggaacctcttggttggcctctttcaagaggtcgacgaggtcacgtccaatgttgctgttgccacggttgaaaaaggcggtcgaggtaccggtgtttccggcacgtccggtacgaccgattcggtgggtgtactcggagatgtcgttgggcaaatcgtacaggacgacgtgcatgacgttggggatatcgagaccacgggcggcgacggcggtggcgacgaggatgggggctcgacccgacttgaacatggccaaggcggattcacgttcacgttgagtcctgtctccgtgaatcgaggtcgcggggaacctctgggcgcacaaaaagtcgcatagcatgtcagccatacgcttggtctcgacaaagacgaggacgagacctccagcaggctctgcgttgaggacgtcgagcaacaaggatcgcttgtcgtggtcgtcgacgtattcgacgttctgcttgatgttctccgaagtcgaaccgactcgtccgacagagaggaagacgtattccttcaagaaggacttggcgaggacctgaatctctcgggggaaggtggccgagaacatcaaagtctgcctgtcgtgaacgccgggcatgtcgctctgctcgatgatggtcctgatctggggctcgaaacccatgtccaacattcggtcggcctcgtcgaggacgaggtacttgatgttggccaacgagatcttgccacggtccatgaggtcgacgagacgaccgggggtagcggcgagcaaatcacaaccacgctcgatctgacggagctggttgccaatctcggcacctccgtagacgacggcggcgcggacccaggatcggtaggtaaaccttcgggactcttcgtagatctgcgagacgagctctcgggtgggagccaagatcaaggcggtggggtactgcttcctgcctcgcgagtaggacgagaacgagccggcgtcctcgacgggcttgggggcgggtccgttggtgaacatttccgacaagacggggaagaggaaaccaccggtctttccggaaccggtctgggcacaggccatcaagtctcgcatgttggcaacgatggggatcgagtacttttgaacgggggtaggggtggtgtatcgggccgacttgatgttctcgaggaggacggggtcgaggggagggttggtgaactcggtaacggggtctgggacgccctggccggtagcctcgacggggatgtcggcgtatcggtcaaagttgagaccggtggactgcacggggcgcgaaaaagggtctttgtcagcgttccgcgtggagcgactgcgatggcggcgaaccacctagactcacctgatgagcaccatcaccctcttctccgtacaattccttttccatcctcgcgtgcctgtttccgaggacatgctttccgtccctccaggctccgaacccatcggggattctctcgcttccacctccagaggagaacccacctcgaggtgcgcccatagaggcaccacctcgaccggcagagaaacctcctcgggagaacccacccgagggagctcctcctcgagcggtagggaagtctgtcccggcaggcgagggcgagacgggaggggcgagcgcggcgggggctcgagcggacgaagcggatcccctcatgtgaggagggacgtaggcgggtctcgaggggttgaggccggtcgcaggggcagaagcaccgttgatcgacatgttgcctggggtaggaacagacgaaaaggaggagggaaaggaacgatcagttggttgcgttcgcgtgcagggtggcgacgagggtggtcggacgacttaccgagcttcttttcgagaccggcagcaccgttttggggagcattgtcgataggagcagtcatgatgtgataggtcttttttttgcgtgtgtggttggctatcgaggtggtcgtgcgagtaacttgtctaccgtctagtcgtgtctttcttcttgttcctttgtgggaatccgctggtcgtcgtctataaaccgagtatagaaaacgaacgtgtgatctgacgaaagaaaccgggaaacggtgatagtagtagtagtaggtagtggtaggatagtcgtgtgggattgacaaaattgtctatggggggtgaaagggggcgaggagagatgatacagacgatacgacgtgaaggaaaagggttagttatatcatcttttgaaaaagcaagagattcgagagcgcgtcgcctcctcctgagggggggcccaaggctcggggaccgaccgatccgcctggaaaaattcaaaaatgcatcaaaggggcgagcgaggcaaggcgagaggaggggagcaccaagaacggggagaggatgatgccgtcattctggtgtggcgcgcgtgactgccgttgagaaagggcaaggaggcaggagaagggggagcaaatcatgcacatcgtcaaacccgtggagtaacaggatgtcgatcggtggctgagtgagtaaattgctcatcacgtgaaaaagatctagacctcgactgattctcaagctgcatccgatcttcggcagcgaaagtcagtgcgggaagtcgcgacgacctggaacctccacccttggattgaaatgttgctgatgaccacaacctcctctcgacgtctcgctcggaaatcatcacatatcgcctcgttcaaaccgacatcccttcctctcggtctacctgtctttcctaaaccttcggcatttagcaacaatcactgacatgtctctcacgacggcccgcatcgacgacccaactcaagacacgccatcggacaatgtagacgccgtccaggtgcaacaagagattcagaggctcgccactgccggtcgtcaaccaggcgatgaccaggacgatgacgacgaggacgaggacgaagatgacgacgattatctcgaacagtacgaattggatagcgaggaagaggacgcttatctcgcagatttgggggtccaggatttgaacatcgaggacgaggattgggaagtagccgatggaggttagtcccccgtcgtcgtcgtcgtcgtcgtcgttatctctggtaccatgcacgaatcgcagagctgatcagacgacaatgaaatccgactcccgtcacagactttaccaagctttacaaccggatgagacaacatcaaaaggtactttctaccttgcctaccacgcgtaacgggacccaggggatcaagggggaagcggataccgaggcggacatgcccctacccgcacgtaacgtccgacgaggagcaggacaggaagacgaggacgagggggacgtcagagccaaggggctaactcctaggcagaggagagcgatggagaggcgtctccagaggcaacgggaggaaacgggggaaggcgaggtggacccgacgacaccgggtacagcagcgagtgggacgaacgcgaacgcatcgtcgtcgaccaagcggaaaccgacgcatcaaggtggtatcccttcgaatccgggtctgctcggtggggttccctcggcacccaaacatttctcactctccgccaatcaaaaggacaaggcggaccgagcgaccgtcgagcaggtcctcgattctcgtacccgggccgtcctcgtctcgctcatccgaaggggactcgtcggtggggtccaaggttgcgtgtccactggcaaagaggccaacgtgtatttcgcccccggtccggccaacccaccggaagagattggcgagggaaaatcttacccgaaaccttaccccaaagacctcgcgcttaagatctacaagacgtccatcctcagcttcaaatcccgtagtcaatacatccagggtgaacatcgattcaggaacgcttataccaaagtggccaacccgagaaagatggtcaaggtctgggcggaaaaggaattgaggaatctgaggagattgtacgatggaggcgtacggtgtccccgcgtggtagacgtcagggaaaacgtcctcgttatggaatttctcggatcggccccgacggtcgaagaacagggcggacaggtactcatccaaggtccgtccaagacgacgtcgtcgtcgggtctgccggacgagggcgaggttgccggacaagaagacgacgacgaggagttggctagcgagatgccgatcaacgtcaaggggcaagcgggggatcaggacgaggcggaatcgtcccgcgcgagcaagcggttgaaggacgccgacgtggacctcgaggagttgagggaactgtacgccgagttgttgggcgcgatgaggtggatgtttaggagatgtcgattggtccataccgatttgagcgaatacaacattttgtgagtgaccagcgggaccttggcgtgaggtgacttccggatcgatcacgcggctgaagctaatttcaacgacgtcgccgacgacgttctaggtatcacgatgcacacctctacatcatcgacgtctcccagtcggtcgagcatgatcatccctcggcttttgatttcctgcggcacgatatcaagaacgtcgatgaattcttcaaacgacgatcgggcggtgatatccgcacgctaggaatccggggcacgttcgactttgtcgtcggggataggctcgatcggttcgacgacgatggtcagaaacaaggctcgataggcgaaaaagacgagaccgaggaggtgctcaaagaggtcgtgagggaatggctcgaatccggcgttggactcaaggacgacaagatggaaggctcggcatcgacggggatgacggctgcacaggacgaggcgcaacaattggcagggaggaaagagacggacgaggccgtgttcatgtcgtcttacatccctcggaaccttggcgaagtgtatgatcccgaacgagatatcgacgtgatcgccgcgggcaagggggacgacttgatctatgccggtctgactggagtctcggggacgaacgcttcttcgggatcgacgggtcggcccaagtcggccttgaagaacgcgagcgacccgacagctgatgagagcaaaaagggaggcgtcaagtgggaagacgagcaggacgaggacgagagtgacgacgacgacgaagatgataacgaagatgacgacaaggagaagcgacctcgagggttccgccacgaggataaggattcgaaaaaggtcagccggcacgaggatgcgtccaggtcgagtctcgttgtgctaacaatctatgctgcctcacgctgcaggagcggaaaaaggcgctcaaggaggaaaagcgagagaagcgacagaccaagatgccaaaggcggagaaggctcgtcggatcaagcagacagcgcataccaaatagaggacaagcatcgatatcgttcccggaagcaaagtttggttggcgcaggagatcttgtacatcataatcggccgctagtcatgcaacgaggtctcatatccgtgattccgaccagtttgacacgtccaagctcggcgtttcctttgatcgaggcggggcgtcatgaaccgtcgcgcctagccgagcccacgcgacgcctcatttcgtccatgaggactcggccgtgatcgggcgatctccggcgaagcaaggcgtcggtcatctgatcggtaaagcagaatcaacggttgacaacctcttatgcctatgataattctataaagagtcggggcggaattaggatctggaggatgcgaaatgaacggcagacatctaaatcaattttggctccccgagagcttagatttgcccttgcccacatcagacagctctagacgatccttcacaacatgcctatcgcgactggtcagatgcccggcaacattgtcaccaagccgcacaatcccaaatggtggaagtctgcctgtgtttaccaaatttaccctgctagcttcagtgacaggaacggggtaagcaagatatatcacttgagaggctttccattcgtctaattcaatctgctctgtctcggattgcaggatggtattggcgacattcccggtatcatatccaggctggattatttgaaagacctgggtgtcgatgtcctgtggttgtcgccaatctttcaaagcccactggtcgatatgggtgagtcggcgtcttgcgtttccattttcccagatgctgacgttgcgaaaccgtctgcaggctacgatatttcggactataggagtgagtcaatgacacacagccctttgccggaccgacgagctgaaaacaatgtttgcagaggtcgacccgcgatacggtactaatgccgatgtcaccactctgatcgacgagttacacaagcggggtatgaagctgttgttggacctggcaagtcacggtgggagcccaagatcggcgaaccgaacgctaataccgctaggtctcaggtcgtcaaccacacctcggaccaagccgcagagttcatcgagtctgccgcggccgcgcctgggtccacctcagaggagggatccaagcgcgactggtacatctggaagaaggggagcgtcaacgagaagggcgagcgcgttcctcccaacaactggggtgccgccttcggaggggtgagtagactccctccttggcacgattggagggtaacttatcgcctgctggtatttgttcttcatagtccgtttgggaggtcagtagacatagtgtaagcaatatattcgatgaaagctgaacgagtttctcctcgcgtaccgcagtggcatgagccttcccaggaatactacctgcattacttttgccctggtgagccccgataatctgtactcgatcgggttcggcacttaaataccctgtccgtagagcaacctgacttgaactgggaaaacccccaggtgcgcgagtttgtctgggagaccatgcgtttctggctcgaccaaggggtagacggtttcagggtaagcctgattgacagtgatatcctcgatgtctcgtccctctgatcagtcagccctacctgcactggtagatggacgtcattaacatgatcagcaagaggctgtcgtaccctgatgtcgaagtgactcgccccgacctcgagtggcagccagcaggcgatatgatgacaaatggacccaagatgcacgactacctcaaggagatgaatgaaaaggtcatcagcagtgagttgaggagctgaaattaggccgcgacgacaagggctaagatatgtgacttgtcagaatacgatatgatgaacgtcggcgaggtgagaaggcttcgacgagtgcttgctttgcgttgtgctcatgctagacgcgcccagatgccttgcactaaagacgccaagaccgtgatggaatatgttcacgaggatcgcaacgagttacagatggtcttcgagttcagcctggtcgatttggacctgtcgcgcggcgaatcatacaagcctcgaaagtgggacctctgggaattgaagaagatcattgcagactgggcgaccggtttatacgatggaggttgggccgctttctacctcgagaagtgagtcgcataagaatctcttgcattcgaaacagcaaggagctgatgctttgcccgatttttatagccacgatcagtgtcgagcaacctccagatggactaacgactcgcctgaattccgttggctttcatccaagatgctgggtctcatggaaatgtctgcgtatggcactgtctacatttaccaaggtaggtcgaccgacaccacattctcaaagaagcgacgagcctaagccccgcgttcatcaggtcaagaaattggtcacatcaatctgcctgaagacgggtatcccgaggaagaatacaaagatgtgcagacgatcaaccgagtttcagggtgagctcaagaacatattgacccgcctcgagcctgtctcatacgaagtctcgttcaatagcattcgcgcgcgaggcggatctgacgtcgaacaggaagtcaagtacgctcttagtcgagggcgagatcacgcccgcgctccattccaggtagatacaagcaatccccagtgctccgaatgccgccactgacgccgttttccttgcgacagtggtcaagcggtccttttgccggattcggtgattacaagggcgatgcccgcccctggatgttgccatccccagatcacaagatttgcaatgcagccgatcagacgggcgacgagaccagtgtcttctcctggtacaagcgactgattgcgctcaggcaggagatggaagtcttgatctatggccggttccaattgctttctgctcttcacgaggatatcttcgcatacacgcgcaccatcgtcaaagccggcaccactgacgaagaggagagcgttctggtcatcctgaacttccgggagaaagacgtgacctacgacgtccccgacgaggtccggaacataggcaaggctcagtatgtcatcggcagctacgaggccaccgagaactatcagcaaccgaggaccgagggtggcattgtcacgctccgaccttacgagggcttgcttttccgcttgtaagctttcaaggcgcctagtgatgaaacggaccattctcgcattatctccttttatctggtgtatgtatgtatcaccatgcagatggcatgtcttatcactgtaggaaagggcgctgttgttagagatttgccttccgcgcacattcagtgtgcacgggttcgattcaacgtctgcaacggcggcctgagcaagcgtccttcaggacgtataaacgaggagaatatcttgctatgcgatgcgagtgtataggtatcgtcatcatgtgcgcgtcgggtactggccggaaccaagcattcctgcgttgttactgtcgtcatcatcgtcctcgtcatttccgagagaaaagccatgctgagccgtattagaactcccgctccgttgttcaccgtgactgccgtcctggaatgaactggcccctctagtagccctctggcccgccgcgtccccccaaacgtcttcctcgtccacttcgaagccttcgtgactgctacgaccggatccctcgagatctcggaaacggttgctggctcgcgaatggaagttgttgctgcccgagattggttgatagagcctcgaaatctcgaagcgtttccttgacctttgcctgagctcgtgcgccaagcagaagaatgccaagctgcccaagaggtttgcctagattagcggatacgcgtcagcttgtccggatcgccccaacgaattggctatgccagtcttaccaggatatccttccagtcgaagttcttccactgtcgcaaagcgaaacgtttgagcttcgaattctgctagctggaataggtgtgggggcgtaccggcagccatccttgagctatctcgcttagaatccccccgctaaagaaaccgcagagcaatgtgaggatcaatggcgcccgccggtaataccagatccgccgagcgtgactgcgataggtcagatgctgataagcttgaatccggatatcatattgcgcctccccaaatgctcactccgggacctcgatgacgaaataaaggagaaaggtagctacacccatctgtatagaaaatgatcaggtcagcacttctggacagctcaaacgctcacactattctactgactccgaagaaatgtagaatcttatcgttcacggggatttcggggataggagccatgcccagtatgcctagtaccactagccatgctgcaaggacaaatatgaccacctgtaatgcgaaaaaggcatgcttcagtgattatgcgtcgcagcaacctcacagctacgaacaggtctgatctgaagtggagatgttttgagaggatatgaacgagtgcatgcatcccacagatcctcccgcaggactatccattgttgtcgatagctgctatagatgtccatgttgatgttgaaaagtggcgccagtcatcccctttcagccaatccttcgtgttctccaactatgcgtccggattaccagcagatgcaaccaattgaacccccctagaggcggctttggcatgtataggcctccatgtttaacaataccgagtggcgagagtggatgatgaacagtccagatgacaagcaaagccgagagacgtggtcgcgcgtttcggtgatcgcccctgtccgcgcccaccttctcgtgcttatacgtcatgaaccctcacccctcggatgtacatgtacctctgacttgcatgacttcacggcttctcgtacgatagcaatacctctggatcaacctagctgcgaaggaagccgcctgcaaggaatatagcaccagatcgacttgccaagactcgaggacggacctccatgcggatgtgaggtacaaccgtagctagccaaacaatcagtccgcacaaggctcgcagcatagcaatataccctagcaaccgaatatggccaagtctccgagccccgcctctttcaaagagctacctcttgctgaattaagggctcaggccactctcaacgtcgaagcaaaccagttctccgctcaaagctgggtcagtaatgcgaagaagtgcgcagaagatgcggcggtggcagaacgggaaggtagactagaggaagctttcgtcaaatacttgaaggcctgcgggtgagtgatagctcggtgcaccaccaggattaggcatcgtctaatactgatggtctgatctctcacttgtcaagattcttcgagctattcctctcacatcgagattacccgcagatcaaggcggatcgtacatcgaatcctctgtggcacgactatatcacgttctcgcaggtgagtgttgctaccccaggagcgaagcggtccccaatatactcaccgagatgtgtctgtaacagaatcgatcgcagtatctagcaaaggcgaagtcgatttctgacgtcttgaagaagagggatgtggaacacaaccagccgaggtgactaagcagagcataactagccactctacacctcatttatctctctatcttaatccgatttacagtagaccaaccgtctccactgacacctcaaatggcactccgcagcaagctgaagagccagatgtgtctgcagggggatcgatcgccgctcgaatggccgccctgcgaggagcaggcatgcaggttcagaccactcataaacgggtcagtcgcgacctcggaggttctgccagctcaacaaccacgcccaccaatgcaggactgagtgtgggtagctctatgagcggtaatcggagtccggttgttggttcgagcaaaggatctaccacgccagtggatcaaccgaatagtcgccgagggtccgcagcgagtattcaagcatactcccctcaaacgcaattagatcagaataagaccgggtcctcgttcacctcgatcaagtcctctcatttgccttcccgtttgcacccgacaccactggatacacaggcttcgaatgaccaggactcggccggtcgaaatcctaccaccgacgacaaagccaaccttgctgtctcgcccctatcggcagccagacctctaccgagtgtccctactgtgacctcgcatcatcataaggcttcgttgccgaacttgccctcatcgcaaccagtatcgacgacgtatggacagtacgccaacggaaactcgtcgagcaacccttctcctgctatcacaccggcgagatcccgtcaaaacacaatctcgtcgatcgaaccagaacaggacgatcagatggcgcattttagctctcacttcccctcgctggatgagttcgaggacaagcccgattttgctatgcccacactgtcgtccgtaaacggaggggacaggccgagggtgcctcggcaaaaaagcggaaatgggagaactatcgatcgtccggatactatcgctgaaagccgggaagatgatcatgatgggttcaaaattccgcgtctgccctctcccccgcggaacaaacctggcgtgccggacacggcgggacataacgctatcagtggcctaggattgccagatatacctcaacgtccctccagccttccgatgccggacacagatttgctcaatggaggtcagacttcgcccggtctatcaatccccaaaccctcgggtgcctcgggacctcctcctctggcaccaaagccgcagttcatgagcactgctcagccgaaaactattgaaattccgaggacaaagcccacgcttccctttactaactcgatcatgccaaagacgctggccgactacttggataatcctgctctgaaagttttgctgatcgacactcggtcttacaatgaacacaaagccggttggatcggtcaggacctacatctgcaagacggcagggctgtagatagtctctgggtagatccgacgatcttgcagaggcaggggtgagactcgctgagtcggtcagaagagcttgtaactttgctaatccagacagtcattgtgctacagtcttgattctagcaaactggagagcgccttgtctcttcagccaacggctgaacaacgagcattcgagaggcgaaaagaatacgacctggtggtcatctacgatgccgcatctaaggctttccctgcgaaaggcgcattcgcgaccgcgccttcgactcttttctcgatcatcttcgagaaagagttcagctccgcaaagacgcttgcacgaagcccggtcttgctggtcggtggttacgacgcttggtcagatgaagagcgtaaacgtgcgcagaccgacaggagcggtgcgggtctgagcaacgggtataaccaggtctcgaaaggtcctcctccaaccttaccgtacgtgttgcccttgctgctgcaccgtaaagcctgagacagttgcagattaatatactacatgccgttcatagcgttaaaaggacaagtctgcctccaaatggcgcttccagcccaggatcccccgacttcggacgctcatcacgcagggagaccggagtatatcgctcttctgcgtattctcgcgacatcacggaaaatgtgagcagacgccataaatctcctgaagtcgcgtccaaaactgaccaacccgatggcagtttgctggagcttacccgcaatcgatggcgggctatggaggcagcgggtacaatggtcaacctatgatcccttcttcccttcaggcaggaccatcccgacagccgtcgagctacaaccgcgatctagaaggaggtcccaaaccgccgccacctgcgtccagcaacaactctcccggtcccctcacccgacgacgcagtgattatattgagcatgctactcaaccctactctggctatgtcgatcgatcttctcgccaaaactcgatctcgtacccgagtctggctcaaccgcaaatgccaccacccgcagcttcatccacgatggttcgacaggaatcaagaccacaggcacctagatctgagtcgattatatcgtttgatggcttgtcaaaactcccggaccaggacgacatgttgtactggagcgatgtcggtctgggaatttcgggattgaaaaatctcggcaagtgagtacacgctgacagattgaaggtatcggcttgttctaatgaacgcggacgtcacagcacttgctatatgaactcgacattgcagtgtttgagcgcgacgttcccactggcgcgcttcttccgaggtaagcagtgacccacttcaacgactgaggtttgtgatacggcactgagctgagctgtacatcctcaatagatggtagttttaagagagccatcaacactgtgaatcctttgggtaccaaaggagacctggcgaaagcttttgcaactctggtgtcaatgctctgggcagaaagttacacttttttgtcaccagtcacctttagagtgggttgctctcttgattgaaaagaagactcctcagctcactcgacttcccacaacagaaatccatcagtacgttcgcgccatcttttgccggcacagagcagcacgactctcaggaattcctgagcttcctactggacggcttgcacgaagatctcaaccggatcaagaaccggccgccgccggtcgaaatgacgccggagcgagaggccgccttggagacattgccgcctcctgtcgcagcagagaaggaatggagaatatacaagcaacggaacgacagctttgtggtagatttgtttcagggtcaataccggaatcgactagagtgtctgacatgtcacaaggtacgcgagtgacttccggcatatctgcgagtcccagactgatgctctacacacatttaccagacatcaacaacttacgacacgttcatgtacctgtcactgccgctgccaagccagaactcgaaaatctcggtctacgagcttattgacgaatttacgaagccggagatattggatggcgaagacgcatggtgggtagtgtgtcagtctggtgcttatgaggtagctaattcgaacgtcgtccaatgcaggcactgccctagatgcaagcaaccgagacgagcttccaagaccctcagtatcgcgagactcccgccagtacttctgatacacttcaagcgtttcattgcaaggcgcggagggttgttttacgacaagtccgagacgtcggtcatcttcccggccacccgagagaaccccctcgacttgacgagatggatgccagaggatgccaccaatacccaccatcctgctgagccaatgcagatgactggcccatacaagtatgagctgtttgctttgagcaatcatcagggcaacatgagcaacggacattgtgagttgcatccattccggttgccatatcgaatcattacgagacctagctgaagccgcttctatcagatactgcattcgtcaaatcctcaaagggagctggagagaagaattggatgtactgcgacgacagcaagattacacagcatacagtcaatgatgtcgtggtaagtgcagagccagccggatcacacgtagcaatcactcacacgaatccatacgcacatgtcatcaaggctcgtccggacaaggcatatatcttgttttacaaacgaatgcaaacttaggacgattctgagaattaaaggagtatatattgggattacagagacgttgtatgtggtgggtacgatattgtagatagttccatgatcgccatcctttcgagttgccttggtatctgtgccatcttcacgtgtctggcgagcgctgctgatcatgtcggaagagaggggctgcaacgagatctagggagtcatagttcattaggtcggaagtcctcctgcgaacgttacgatgagactcacgttcattcttcatccgtgccttctgggctactttgcatcctgctgtagttatgcttgtgagagacagccagacctccagcgctgggcttgaaccaggaacaacgtttggaaagcgccgaagaagatatccgatggctcaaacggcgagagcgactgggacgagcgctgtcccgttcagtgaaaggcgggaccttaagaggcaagccagaattcccagcccgaattgacgtcgaggccgatgccgggaatgcgtggtggtgtttggtggcgatagcgatgttatcgtacggaggaaggtctctggtgtggttgtcgtcgtggatgctacgcctgacgaattctcgcagcttgctctcatcggccatttcgggctcctcgtcggattggttgagggcgacgatcagcttccaactgggcgagcaggccagttcgttgtaaggggatgccccgaggggagcttttgtgtagggattgatgggaaaggacgtaaaagacccttccgagtctgaagtcgagaggagtccgtcgggcgatgaacccatcgagttgcgaaggctcttaaatcgcttgcctaggtgcattcgaaggctggacatgatgatattgttgcgaattagcgatcgtggtggcggaatgttccaatatggatgtagctgagaacagagcaattgcgttgcagggtttgtgcgacaagtctaggagaaaatggagttgaatgaagtttgaaagaggtgtgaggttgttgcgagtcgatagatctggactgaacgtcctggtcctgccagacgcggtcgcgcgcgctaatcgatgataatgatgatgattcggtcattgtaaccaaagtacaatcaccctcggaccgtgcacaatcactttggtcggtcgccactgcttcagagcgtggcaacgacttgtctagaagggaatccagttaccaatgattgctattggcatgccccaactgcagcggacggcgggcatattcagcaacggctccaattcatgcaggccgcgctaatgactcacgaatctcgtctgattgtgaagttcaacgcgcacttgatgactttggcttcccgagtttgttcgatgcctgtcatcgactgtcccaggcttaagccaggaatcgaggaattttgcactcgaagacgcgatggattgccgccgagtgcattgggtggggaagatgtgggtgaattgaaggtcgagttgttgaacggatgagttggtgcgggtcccaggacaggactcgctgtcgctgtcgtatgcggcaccgtgtgatcacccttgagggtcttggttagatgtgatggtatgtgtaaggtgcaaactgtgttgacgctcttggtgtctgccaaacatcgggctttgggtcagattcgtttcgaaaggtccatgactgccttgctcactggtatcaaacgctatactaccgaacagctggatacgcacagatatttcgttaagcggcatcttcagcaggatccaatgcacacagcacgtacctggtaatacttgacgacagactcctcgtccataagttgaaagatgccgagattgcctcccctgaaacactgagacgggatgcccgtcaaattcgacatttccttgtttcccttgtatatttcacccgtccgtcgccagagacaagcgggtgtatgaatggccgaaaacactcgatcatagtcgagcatcaggcgctcgaaagcctcctcaacaaagatcagatccaggtcgctgaggctctgcgcgatggcgcggaacgccggccggaaaacagacatgggtcgaagaatcgcttgaatagatgcttgagagacgctgcaaaatcaaagccggttagtgaaaaggacgtacaaggcggacaggcgcctgaaccgacgaactttttctcgagccacttgtacatcctcgcgtaccctcttgcgtaatcgtatggcttcagtaacccagcttcatacttggcctgaatgactttcttcaacctttcgtcccgagtccctgactgttgatccgcggcggcgaggtagaacttttcgctagagagagatggaatcggtcaggttggtgcttggatgcaatatcgaacggtcaaggtcatgtacgtattgctcgcctctgggatgagcggtttgacgtcctctgcggctgcagcttcgaccctcttagcgttcgtctcgacgttgaatagccccatcagcggactacccaaggcgttccaatcgaacccataatcctccaaagcgtcgagcccgatcaacccgttccccggctgatctgtgctccccagctgatcgctaccgagcgtgttgctgcgactaggcccaaagacgctctgcgggttcaacgtttgcgtctgagccccttctgtgaaaacgtccccgagcccaccgggtagagaagggattcctaggctttcaaggtattcggagaggattccgaattctccgcctcgttcggccgatgctcggcgtggcgcattgttcaaagcgacgccgaggtacttggtcgtatcctgacggccagtgatgttgttgtcctctgctcgttgaatattggtcgatggggatgatgaagacggtcctgccgggtagatgttctgcgatgtgtatggcacgctcgagctcgatcctgcggcattgagcatggtcatatccatcccggcatcgtttccaggccaaatactaggtatgtccgagcccacagacaagagattgggctcggtcatgatattgttgccggcgtcatccgtacgattgatgttcgtgggtgcaaacgcccagcccgacgacgaatcctgggcctgttgcgctggcattcccgtcgactggtaatttgagaagccctgcgtgtttccccacgaagcagatgacccgacaccttgcgagccctcatcccgctcgtccacctgcccaggcttcgattgactcatctgcaggaaacctgcaccagtggaagacgttctccgtttcttgtggcccgtcgcaccccccccgctcgtagtcggtcccgagccggagctcgccgcgctaccactcgatccgttcgctcgtttttgagcggcacgggaggcctgagcggcgagttgcctagcagccaatttggagtcttcgacgcatagatgggtgataccacgtttgacgctaagggtggaggtcagacgagccggccgacgtgttaatttcagtcatctgggtggaacagctcggcactcaccatctccgacaaggtctttcggtatcacataccatatgactatcatatcgatacttgaacacttgtacatctatgtatcgtagttgagccaaacacgaccgactcacctccgacgacagtagatgcacgacctgatcttctttccacccggttcgcgcttgctgcgtttcgtatcgctcatctcgtaaactccgctttccatctcttctggagactcgacatgatccatctccgactgagcatgctcgttcacattggcgtaggaagcggtagcctgctggaagtgaggctgagcttgcgcttgttgctggtgtgatcgctgttgctggaggtttccggcattgcccatgttttgcatctgagcatagccttgtgacgacatcttccgaacgaacaagacttgaggaagacgtcaagagggatggcgagactctcgtctgaatgatggtagtattgacgaattccagctgcaagatcaggtaatcagagaaatcagtggatgatgatgtgtaccgtgcaggtggtttgacttgacccttagcctgataaagacgttcgacccttcctcggtctcgctctgatctcttgccgctaggggggtttcgttaccgaactcgatgacggcagatgatgacggcagtaacggcagccatcgggcgacgcgcacgttgttagtagtaaggtagtggtcagggcagagtacagtagtgtgatcgaaccgcccgagcgaatgttgggttgactcaagagagagcgacccgatatcagctcgtccacgaaatagtcaggaaaagctctgagacaacattttccaactataacactagctagacatatatccgactcgagattcgatcactatggacgatgagatgaagtacttttccacccgaggcggtgacgagcgattgacctttgaagaggtatgtgcgcgcatacggcatgaacctggattttcggccgaactgatgagcgagaccaccttatgaccgcgttataggccgtcctcacaggactcgctcctaacggtggactctacatccccgacagaatccctgctctctcttcgaactgggccgagtcttggaaatcgctctccttttctgaactctctttccgcatcctcagcctcttcatccccacctcgtccatccccgccgaagacctggccgagatcatcctccgctcatactcgacctttaggcatgaggacacgaccccattgaaacaggtggaagagaacgagtttgtgctcgagctgtttcatgggccgacgttcgccttcaaggacgtcgccttgcagttcttgggaaacgtgttcgagtactgcttgaagcggaagaacgccaacttgaaggaaggcgaagctaggcacaagttgaccgtcgtcggtgctacatctggagataccggaaggtacgtatttagactgcgtccgactatgccgtcgtcatactgacgatcagattcgtctacagtgcggccatctatggtctacgaggaaagcaggacgtctcgatctacattctgtacccgtatggacgagtatcgcccatccaggaacaacagatggctaccgttcccgatgagaatgtccattgtgttgccgtcgacggaacctttgacgactgtcaggtaaagccctacccctttgatggcggattcaagtaaacagctgaatgacaattgcttctcgtaggacaccgtcaagacccttttctcggacgtcgatttcaacgcgacgcatcgactcggagccatcaactcgatcaactgggctcgtatcctcgcccagatcgtctactacttccacgcctacctccatctccccgctcacgtccgtgagaacccgatcgccaatgtccagttcgtcgttcctaccggaaactttggcgacatcttggccggattctacgccaagcgattgggactacctatgaaggagctcgtcgtggcgaccaacgagaacgacatcttgcagaggttctggaagacgggaaggtacgaaaagaaggactcttcggcctcgaccgagggtgcagccgagaccgaggtcgttcagggatcgtcggacgggtcgcaggctcagactacgggaggcgtcaaggagaccatgtccccagccatggacattctcgtctcttccaactttgagcgtctcctgttttacctggcctacgacacgcaggccatcccccgatccaacgtcgccgaggacgcttccgtagaacaaccaaaagctgaagtcgcaggtgctggcaacgctgccagccaggaagaccgggtccgacgagcacaggccgccgtcaagggctggatggacgagttgaagaagaacgggtcggtcgacttgggcagcgttttgcagcgcgccaaggaggacttcaaggcagagagggtgtcggacaaggagacggccgagcagatcaaaaagtactactcgcgagaatccaagtatggaccttatgtcgtggaccctcatactgctgtcggcttggaggccacccaacgggtagcaaagactgcgtgagtgaaatggtctcatgatccgtggccgagctcgagagctaaaccgactggaggcgatctggttcagcgctcccgggaccacctttgtcaccctctccacggcacacccggccaagttcgatgccgctgtcaagggtgccctacctacgtccgaattccccgactttgactttgacggcaaggtcctccccgatgttcttcgagagctcgccgggctggaaaaacgcgtcactcgggtcaagggcgaacagggagtgagagaactgatcgaaaaggtcgccaaggagagcagggaggccaagcccactcaagaggagggtaagggtagtatgtaaaggtgttatgatgtagaccggttaagcgttgggcacgaactttgtgtctgtataatatgcatgagttcgtggagcctgtcgggcgggtcgggagtcgggaggcgatcgtaatctcaatcgaggttgcggttgacaaaatgtttgatgatgatctacgcgcgcggatgcacctgggggtaccccacccccccttcccttgaagggcttattttgatcgaatactggtatcaagggttttgattgctggatcgaggtcagaaacccctggacctcagtcggtacttaaaatcttctagagcagaggcttcaggctacgttagcagctctgactgtctaccgggtgagcaactcgtcgcacatcgatcaccgcaagcgctgaccgccgagtacggacttcgtacccggctcaaagataggggttcggtcgacgtgacggttgcccctcgacggtatcctttctagagccaatctatgagctctgttcccaattcttcatcaaccagctcgaatcatatcgccattcacacgaaatccgcagcgcgatcacgatgaatccctcgtctccagcttcggcgcgcccgccacagcgccccctcgggacctctcaacagccaaacatcccctcatcctccgttgctcctccaacacctcgtcattcgattcacagtaccaaacttacgttagaaaatgctccccttgacacgccgcatcgtgaccgtcaacacgagaagtggtcaaaagcctggaaaggagatctgacgcgcaaacgggattcgggcacgaccatcatcacggatcagcccgacgaagggtcgaggctagacgggttgggtgtattagatgtcacggatcagtcccttgaggatgaggctgacttgggatgtttgagtctggacgaaggctcgcttccaaaagatcgtgagttcgaatttcaataatcgctgtagagacgtttcatgtcagctgaacgagttccatgcagatgaaaccagcttggaagaactaccctttcacatgtaacgtccccgcttacactccggattggtcgatcgagcatcactgagtctcttcttgcatgttccacagtctccttgaaatcgtcacatacctgcctactggcgacattctcgagttcgcatgctgctcccaagccttgcatgaagtagctcgttcgccctcgacctggcaaaggctgtattacaggcacgcggggtggcaaatccgacgacccatccgacccgatctccgcgttcaaaccgagatcgatgaaccttcaactgacaccctcgattggcggatgttgtgtcgtgaacgtcaagagctggaagaaagatggaccaagacgagattcactccacgcaagttggcggtcaagccagccaaatccgccgtctactgctcgttcgcgctcgagaactatatcatcacgggaagcaggaacagatcgatttgcttttacgagtacgatcaggacaaaagaagccttctcgtcatcttcaagatcaaggaggcgcatgcgggatcggtgctgtgcatggtagtggatccggcaggcgcgggaggcgcggggacgatgtacacgggtggttctgacggcaaagtcaacgtatgggatctcgccgagttcttgaccgagtgggacacgttcaaggggataccaaagctagtcgggagcttgaaaggacactgtgggggtgtactcgaccttgtcatcgacgattatcgcgtgttgagttggtgcgtctcctgtgctgactacggttgccgtttccaatctaaacaccttccggccgggaatccgcagctcgaaggatggcacagttcgaggttcgttgctccatccaactcctactcgactgtatctcacactccctgcatcagtttggtgcagacaaaagttaaactcccttgcccaagttgacctcctcggcggtcccatcaattgcatctcgttgcatccggaaacgggcattctggtcgccgctggatgtcatgggaagatcacgttctacaatttggaagagatgaaacctttacagaagtcccgatgtcagtccagagagacagtcgcttgtgtaggattttacgtgcgtccgatgcagagcaggcatcggaccatgatgggctgaccctgtcactctctcttctgccaggaggacctcttggtctggggcgatactcatctgcgggtcgcgcgaatgaagacaggcagaatcatgtttgagcagtcggccgatactgaattgattcgctgttttaccatcatgtctcgaacgggcagggtcattaccggatcttacagcaaccagatacaagtgagtcggcttcggacgcgctcccttcgcccgccgcgtttgatcgacgtggaaacgcatcgcagatttggcctctgcactcgcttcagaatcgaaggtgccaacctactccaggccgcgttttgaccatcagtgctacggccaccaagatcattgcgtaggtccttgcatttcaacgtttagggtggcgacggactagaccgcgagtctgacttattatcctgctgcagtggggacgaccaaggcaatctggttattcaagattgtaagacagcaagtgctctgtcaatacgacctgctttagctgaagtgtgacccctcctatgtagtcggtcatggcctcgtctacgatggctactttgactgaacgcggcttgccgatagtctgctccgcccagctgttcggctctggaccaagtgtaaagtagtgataatgtgtccaaaaagacgatacaactggaccttgtaaaaatctacgtatgacctcgagtcttcacccctgagaatgataaaagtgtgatgcctccatggacaccttattcggacagagcacctccacgttctcgactctcggcactacggctcctcctcagaccgagcgcctcgctgcccaccatggccttgtacttttgacgcttgggatcgttttgcctcttggctagcgtctttttcaccttgcgttcgggtctgccattgtgaccaacacgacagtcagtcacgaagcggagccaggttgcccgagattcgacccaccgaaccacaatgacgggcacgggactatgcgagacgcagtacctgctgacgctgcccatcccgggtgccccgagcgcggctccgaacttttgcaacttggatcgagatcctttggtacccacgatcaaagcttgtcaagtcgagcgaagcatcaagtcagccgcgcacgaggaggacgagaggacaaggacgcgagctcacagtcgggtcgatatagcgagatgagacgcatcaacgtggaagagacccttccggcgacgaactcgacgatgaccgagatctgcaggccaatcctgattagcacgccggcgtggggagggatatgcgagatcgtggcccagccctgaaactcaccctcctatccgagacctcatcgttgagctccaagacctttctcaacaacccgcccgcttcttccctgaactcttcctgcgcctccttgctcgccttttccccttcgtccagctcgatcacccggacggcgacgatctcgtctccatcctcgatgagagattccatcagccattcgagcgcttccgagccggattcgtcgggcgagacggcgaccatgaagactcgggtgttgcgggttcgtcgataagcgtcggatttggcctatggacgcgatggggagcaacccggatggcaagcgttacgatcggatcaacaccgagcgaaaagattgatgaggagagatgaaacgccgactgacctgaagggtataactgaacaaggctgcgttcttttcggggttatcaaacgtctcaaacccaaccttgcgcgtgtacccaaactcgggcccgatcgttcccgtagcccccgtggaagatgtcctcgtcttgggcatcccatacccaccgcccgaggtccttctggtatgaatgtacccctggctagcatccgtcccgacgagggtgttggcgttgctgtccccaccctcggtggtgaccgactcgggacgatgcgcaaacgaggaatgtaacccggcgttgttcatctggaggtgatcgttcgagctccgtcggctaggttcccaagggaaagagacccgaggcgcggcagtgctacttgcggagagtggagagatgggttcaccgggcggcgatggactgccgtagctcgactgctggatgatgctcggtcggagtgagggagaaggaccgggtgaatttccgggcgatgattgggatgcacggaggatgggtctttcggtcatttgatgaggtgctagctactatttttcttcagacggttgatggtatatggtatttatgagtcgtttgggggtgaaagggatgcaacgtcaggtatgatcgacgacaacgacgatgatgatcgatgatgatgatgatgatgattcgaatgccaagagaggttgtggatacggcttagagcgggaaagggccaagggggaggggagaaggggggaaccgcgaaatcgattacgttaacccgtcgcagtcaacaacctccggttccggcaaggacgcccacaccttctgaccatgggcgatcagtttgcgaaccaggtcagctatgacaaattgacaaaaggctctcagtcgctcgaaaattccacattttgcaacctgctagatcgtcgaccaaaagatgctacgatccgagcaagacgggtgatcggacgggatgcgatcgaatgcttcattcggcagaggcacctggttggtggtcgtcggcaaaggcttcgagccttgatcgaggcgcttcactcgtagtttaccggattcatcatacgtgggatggccaccttgaagggattgcacatacatcgatccgaatctatgagcagaggaggtatgaagaaaggggtaattgtgcatcgaacatgtcgtccctgagagtacccattgacgcaaaagagcttccggcaaaagtcgaaaaaagcttccgaacaatctcaacttttgaaagttgcaacaacctccaaaacaggttcaaccgtcgggaaatcatcaacattatcaaagtgtttgaccgacaaccacggaccattcataggtcatctgcaaaaagatataaccagagccaagatgcctaaagcgactaagaaacagaaggaaaaggtcgccgactttagcgtgagcaaccactgtccctactgttcgcagacatgactaggaaaggtggcctgacgatctctgtcgaatcgacctcggctcaaacagaaagccaagctcaaattgggcaagggcaagcagattgctaacaatgctacggatacttcatacaaggccaggtgtgagtgcaatgggtgtcccggtctatggcatcgaggctgaatctaagcctgatctctccgcttagccatcgccctacccacccagaacccgttgctccgctcattacgcgagcaagaccccgatgctaacaaccctcaagacctgaaacccgtctcccaccgcggattgacgctgcacgaagtcctggtcctcctgcgacataccaacaagggggccaggcgggaagcgttggacgagctcaaagaggtattggtggatgggatgcaaaaaggagtggctatcggtaggagagagggagaggtgggcatggtcgtcagaggaatcttggctttgattacggacgaggtgggggtcgtgatgttcgggatttcactgccggcgcggtactcatcagagtgtctcgcacgaatataggagcgtacagtcaggaaggcgttgttgggtttcgtcaactggtacctaccagttctgccttcggtgcgtccctcttgtcgtagtccagatcaacttcgtaaagctgacgaggaaatggcgactcgcaggacgtcatcgacccccatctcccgatcctcttgcttcagacgtcgtcggctctatcgcacatctttcccgaggttcggatcgacacttgtcacctcgtctccctcttgctgagcatcgcacccgccgccgtggtatccacatggccgtaccccaaatcggcgctggagacttcctctcagactaccgaagagaacacgatcttgtccggcctgaggttggccgcagggctcgggggtcaagcgggcgaaggtggcgcgatgggtcagacgttgcttccagcgagtaaactggtcgtcttgaagaccatcttggcctttgtccgagcggggctcaagaaacagggactggtctcggtcgggaccgccgtcgcttcgggctcggggacggtcgctgcgaaagacatacccttcccacaagagattttcgagcgattcgacgtcgcgcacaaacgcacacgacatcctctcgatgggcaggaagacgtgctcaaggagatcaacctgtcagatatcgtccctttgggaaagcttggagaggcggatgggtggttgttcggaacgggtcagaccggtctcgagaccaccggatgggaaattggtcgacgggctcgggatgatgatcaggatgaatacgagttgggagaggtgctatcggtgagcaggttcaatcggcaaggaacgataaacgagacgcggcggactaacccttccgaggcttccagtccctatatctcaaccttcaacccttgctgctttcgtcactcctcgaatcggcacctgcagcattcagcctatccaccggatcgaccgtcgacgtgcacgtagccttgtgtagcacgatcatcgacctcgtcgtagcgctcgccggcgtcgtgctcaaggatttccccctcaccaagagcttgcccgagacgaaaaaggccgtgacgatcatcgtcaacaagatcggggcttatttccctttcggaaacctgaacgagatcagagggcaaaaggtacaggtcttgcgatgtccaaccgagcttttaaagacgacccgagcctcaaattgacaaggtccacctcttgccgtctgcagggaaatgctcaattggtagagacacaacaagccatctcggtggcgtattcgacgttggtagttcagctgcaacctacaccgggacgattaccgcttcgaaccaagacagcgacggccaagcaggtcgccggaatgatggaacagggcttccaggagaccttgacgggacggaccaatagggaaaaggcggccctggcaggggtggcaggttggctttgcgatctcctggtacatcgctttcaggaggaatcatctcgatagaagctgacgctcaccatgacctgatagtcgactaatggggatgcgctacaacctgcgctcagtcctcatgtctatgtcacgacactgcccgtcatctggtctctgttgacatctttctcgttcatccccccggctggcgaggatgagtcgattccggcgatgatgctcaacgccttgcttgagcatttgtaccgggcaggcgctgactcggctacgaagcgactgggaaccgagttcgtgtgtcgcctggtcatcgtaagtcttgcagcatcggcgtgaagaccggcagaccctcaaccagaatccttctcttctttgcaggtgcacgagaccaaaactcctgtatacccttttcatatcccagccaaatcaccatgccggcaagttttggcaaggtggctggtatcgctgccccgtacgctctgggaattgggtaacaaagaccacgaaacctcccgccagatccttcaattcctgctgtggctaggaaatcgcaacgatgcgctcttttctacgcaagaccggaaaacgatgtgctccaccctggcgccatacttttggctagaacacccttcgaagggacctgtggctggcccatgggccagactagacaacgagcctgtccggaaattggctctggatgtggcaacggtctggtcaacagctggcgatgacctgcacatcgccgttgccaaagtcgcctcgggagcatcgccagattgcgcatactggaaacgctccgcctaacgaccattctcacgactcgatccgattcatgtttgtatcctgctagatttacaattgctgttgagatgccggagtgccgggtgtatatgatgtgtgaacaacgaaatcaaatgggcgtaagtgatgttacaagccaggatacgtgttccgacccgtagctattcgtcaaagtcgtcgtcttcctcgccagactcgtccgtatgagctactactcgacgacgggctaaagtggatcgcgaaattttagttaccgccgctaacagccgacctgtggaggctcgtctcacctgtccgcttcttgacgggacttcctggtaatggcttgttggctcttcgtcttgccgccttggccgtctttttgacggcattggcggccaatgcgttgtcttcctctcccttggccttgtgttctgccaggatcatctcgaactctttcaactcggcttccggcttgttgctaccgagcttgttgcttcgagccttgaccaagatttcgttgaagcgtcgatagacagtctcctcatgaagcttgtcttggtagaacggcaagccttcgatcaatttcttgacagaacggtcagacttgaaaggtaagagggacaggcagaatgcaatgtctcgccattgtctctcggtgtcggctaaacggaatcgttgacatagcttctcaatgacgctttcggcttgcttttcctataggttcgaactcgtcgacgtcagtctgaagtatattctcccttcgcacgaagcggggctggacccaccttctcgatatagccaaacaccgtcttcatgatcctctcaaacatctcctcgtcgacggcgtgctgaccaaccgacaggtggctgatgatgtcttgcaaattgttgtaaagcgagttatccttcttggacaattcgtcgaagaataacttagccaagtctgacacacggggctcttcgtcctcggtacacttcgccatttcaccgagttgccctttgaccttgatcatcccgttcaggatcagatgagtcaacaccataagtgtgttctttttaaccacgaggtccttgtccccgaggccttgatataagcggtcgctgttctgtagatgaagcaacgtcagtcccatactttagaaaggtggcatagaatctcgctcgactcacctcgtcgatcatgttactgaaacacaaggcaatatcaccaagcgcgatcacaatattactccggacgatagggtccttggaagtctccaggatcttgaacaagagggggagatgggcctcgcaaaattgtgcgctaacgcacatcagtttagtcatggccaggacagaggcttcccggagggtcggggactgaaatcgcgagaatgagtctcaagtcggaccagcaacgatgatccacgcaaactcaccttgtatgccttgggagcggaacagatatgggcgatcatcgcgccatatactgccagtagcgagtcttcgccgtaaagcaactcccgctcgcggacgctagccaccaggtcaccgatgtcatcctcggcgttgccagtcaccgcttcgagatcattggtgtccttgtcattggctttgcctgcgttggctgaacccccacagctacatcaatactggcttttgtcggcttccacaacacttcagcctcacctttattcgactcgtctttctgacgcttgacctcgcgctctactagctcgagatagacgatatgtttgatcgcgacgtggccgacaacaaagacgagctgagccaggtgtgtagcgccggttgattcagttcgaatcgcaggtgcaacaggctcctcgtcggtttggatatcagacatctgatcttcttgcggccgagggggattgaagacgcgggcgtgcagcttgtggatgatcttgctacataaaacgtctggttgctctcccagcagatagatcgtattcagggcttgttcagccatagcaaacctgtgaaagaaaaatcagtcttcagaacagaccgttcgatgcggtcgacttgccattggctggatcgactttccccctcaattgtacgctcaagtcgctcgaatacgggactgtccataggaatgcgcaacgtcttgtcgatcaatgaacctgtgatgtggctcgatgttaaccacgatcaagacgattcacgtgcgcgatattgaacttgcccttgacctttttggcgctgccactgagtcgttggagagcgatacacgtgtatcgcgccaagacgagatcatcctacgaataacgagcttacggttcagactttggcaagcgaataatggaagacggcacgaaacacaaacctgtcccaacggtcctagaccgatctttagcagcgtatcgaccctttccgtcacgatttcccgctttgcgatagcgagcataccgaggatgatgatggcaccccttcgctgcgccttgtcgataggtttactcgtgctataaacgtgccacagcctgttgatgacgtccgggtggaccccttcgctctcgtgttccgccatcatggtcctcatcaattcctctagcgacgtcaattccgccaaggtggcgtcatacgtccgttcgatcatattcttggtgatcctgctaatctgttgctgagcagtcatgttgggatccggcaagacctcgaaatagagccgcttgtagacatcaatgacgtgcgatcggatccccttgagctcggtgccgtcctcggtggtgctgttattgtccttgctccaaatcaagtgaagcatcgtcttgatcccgacttcggcaaagtgcaattggtaatggtgtgccgtctggaaaaactccatgctggccaaaacctcggccttgctcttggacgtcaacagttgtttgagcgtaggcacggcgttttcgagttgttgcacaaaatacagagcctcggcgtagatcttgcgtgtggctcgcatccgctcagcaatctcgtcgctgacgatcaggtcatcagcaggagctccttccggtgcagagacctcggctggcgcctcttcgtcgtctttagtggccgactcgacctcgtcaatttccatctcgtcttcgcccgtttcagtcttggccggccgtctgcgtccgctcttcatattctccgcctcgtcctcgtccaagcctgcattccgcctggctacctccatttcctttttctcgatcgcctcgagtcgcttgcacagcgtctcgtaacgttcctcaatgagggaggtgttgaggggacctccatcaattccaccatagatgtgcgtttgcaggagcgtattgaggagctgaatcgaagctttccggacgctcgacgtcttgtcctcgagcgagcggatggtatagttgagcatcttgagacgttctttagggaatggttgtcggagtctacgacgagggagaaagaatcaacacggtgacagaccggaccggaccacattttgtccttgtcatattcctcggcacacttactcgcaaatcttgatgagggtcgccaacagtttactcctcacccacccgttgttatccaaaaacctctcaaagagcagctcaaagaaccccttgatctgcttcttcttggcctcctcgtccccctcgcccatcatcggaatgttttggatgaggatcccgataatctctatgatggccatgcgcatcgtgtactcttcgctatcgagatgggcgagcaggagactgatctgtttctgcaccaacctaggcgaaagctcggccaatttgaccaggaaccgggaaaacgatttgggtcctttggcatcgaccgactgttggaaccgcttgttagccacctcgctgaaagagggcatgtcggatcagcaaggcgaggtgatggaaacggagctggccaagcaagaaccgcatgtctcaccgtaggacctcttccgtcgtctgggtatgatcaaactcggcatcgaggatggtcaaaagctcggccatcggttctgccagatgttcaaagtagttcaagttttggaaaatggtcgtctgtgcacctgcgggtagtcatgccaacgaaagcgagagcgtgaacatgaacccagatcagcttccagctgccaacgcctcgaatcgctcaggacttaccaaaggcgtgcccatgcgacttgacggcgacgcaaatcacccgataaattcccgtcttgatctcctgactcttcaacctactctccgtctcgctgatctgccagacggatttcgtgaaacatctatatcaccgcccccagaaatcagccttgcgacgcgcgctatgatgcggacatgatccaggctgcaatgggcgagacgtactcgacaaaggcttcccgctcgaccgaagtcgtccatatccggtccgtcctgattttgagcacacggtacatcgtatggagtaccacggggagctggtccgcccaattccacactcgagaggtcggggtcgatttcgtcgatttctttgcaggtttctatacgggggggagcgcgatgaaagaaaatcgggggcgagatcagaccagatcgagcaaggtcagatgggttcaagagagaatcgacggtattgatgctatgagtgcctcaccttgcccctccctgccctggcgacgggtatatccccttccccctcgtccgcatcgccaacctctttcctccctcccagcctctccccgaccttgaccatccagaacaacagaaaggcgtacatctccaacggacgcttgtgcatcaaaaaggtctgttcttgcgtgctcgggtcgttctccgggttcgggtgatcgatgtcccggatggtctgctcggattcggaggaaagggaggaacagagcgagtcgaggagtttggagaggatcggaccggggacctggtcggcgtgtctataaagaggaaggcggaagagggagccgaagacgtttgatggtcagccgagccgagctgacagagactggaggtagttgctcacttgagcaagcttcggtagacgtcgaatatctcggggattgttatacactctgtactctgcgtgacctgatcgatggcatcgtccagcgcccgagtcatatctgccggggacatggattcgacatcgagttcatggtcgatctggtaaagcccgatgtccgagagcgactggacctcttcctgcaggttgaattcgggcatatcggcagcgtcgtcttcgtcttcgtcgtcggtggagctatgtcgacgtgttcatgcgcagggcaagatccagagaaacggtccgatggcgatggtataaagcgtagtatgctacccgtgagctgcgtgcggtcgtgtgtgcttgggtctggaccttgatctaccagactgacgaattcatggatgatgcatgggggttgcatatgtgatccgatcgaaccctttactccgagtttgtttaccttttcctgctgaaatggtgtggcacaagagtcaatggggacggggttgttgttgacaatgtcaggagagaagcagtagccctcgacaaggcaagaagcgcactctcagataacgtcataatgccgtgacggtgatgatgctgcgcttgaaccaagttctctcggatccgcccgagtctcgctcggcatctccccccctctccccgcagtctcatcacttggcgatcacggtcgaggccgctcgaacatggaaattgctgtgcactcatgcactcacaactactctactctactcacttactactctagctactctcgttactcgttacgcccgtcgtcatcgccattcccgcctgtaccgacctcttcgaccgacaatctggcatctccgtcggatctcgcctacctgattccccccgtcgaacggttcctgttcgtcatataagcgactacggcacgcgcatcacctacttcgctactctcgatactcgaccttggagatccaacacgcttcctttcaccccgctcgctaacctcctggcagacgagctcaaaccaacagacgtttcggacacgaaacgagcggcagatcaggaggctcttttgggatacagcgacgagatcgcacacttctatcggatcgtcactcgttactctcctaaaccttttcgcgtccatcgacattatcaacaacaaacgtcgacgacccttttcctaccacttacaactcacctctcagtgcacataacatccctcgtcagcacgccggaacgacatgggctatcgaggcaatttcatcgcccacctccccggtcatatcctctacctggccgccttcatcttcctcgccctcgtcgcgttcaacaccccgctcctcaaatccttctactttctcaaagccgattacaccgtcggacagaacagcggagaggtcacgtatggtacccttgggtactgtgtcaagcgggcgggtgcagaagtatgtactggtccgaagattgggtacgaattgggtaagtcccggaccggtcatggaccctgaaagtgaaagggggcagacgagctgacgggacgagagtcggtgctgtctcccggtagatctaaactcgatctttgggctagatgggagtgcggataacttgttcaagattcccacggcgatcgggaaatacctcacctacgtcttgatcttgcatatcgtcggtgagtcgcacgaggatactcgacccggtctcgagcacgacaggctgaacctctttgcctcgcggatagccgtcgtctcctgtgcggcgaccatcgtcttccggctgatcgataccgtggacaacgtctccctcctctgtttccccgccttgctctcctggttcacctcggccgtcaccctcgcagcgttcgtcgtcgatatcgccatgttctacatcgccaaagccaggatcgattccgtcgatggcgcgtcggccaagatcggtctgagcgtatggttcaccctcgtcgcttgggtcttgcccgtctttgccggttgtttctgcgggatcagcgcggtcgagaacaggaggaaacctaaagccgctcgaccggacgaacaggcttacccgcagagcgctgggggttacgctagagttcccggaccacccttgaacacgtacgcagagagggagatcagcgtcccgctcgacccggatgccgaggggaaaaagagcggagaggatgacgatccgtacaggtcccagcacaacaacttggggtacagctcgaccgatcaacattatcaaccgagacgacagcctagtagtagttatggacatggcacttatcccccgagggatccgtactcgaccgggtattaccgcgaatacggagacgatcgagacggccgggatggggatctaggggctggggtaggtccgggaacgtttgcaggtgtcggagccggggcggcggcgatggccggagccggaggtgcggctgtggcgacggggtacggacaacaacggacgccttcggctcaagggtacgggtatgatgggtaccagacgcaacagtcgccgccccctcagcatccgcaacctcttgaaggacagggctatgcagggtacgggcagtacccggcgcaatcagggtacgatcagcagcagcagcagcagcagtacaatgcggctgatccttgtgagtctgatcaacgttccgtggtcgtcgagaacgattggtgactgacatccctccgtgcagatggcaacgactcgtcctacgtgcaaccgatgcccatgcccgtggctcgtgctctgtcaccgcagtctagcaataccgccagtcgagtggacccattcacgaatccggattacatgcacgatcagatcccctaccctcaacagccctctgccacggcgggatactctggtcaggatgcctatggcggttacgaaacccccaacacggctcggccaatggattcgacgaattacggccacacgtcttacccgcccaccggggtcgtcgctccgatcccccgggtagtcaatacccagatgcatgacggaactccacacttcccactggatggcgtgacttcgcctgtcagtccagggcgtgccgatgttcaaatgtacgacacgcccccgagctacgcggtcgcggccgatatcccacagggtcaggcgccacgacggacaggatcgatggacaagtcgggaggttacttccggtagttgccagaggacctcgaacatttgtagatctgtggccttccctcgagctggtcctcggtagaccgtggggttgtatcgtgatcgttctctttcccatgtagcaacaacctatcgttgacaaatataggtagagcctaaacccgaagaatccgccatcggccatctccggggaatatccgaccgagaccctcgagattaaccatcgatgttataccggttcgtatggacagacaccgtttcggtcgagatcgacagggtcgcttcgttcttgtacttcaatctgatcgatatactgaccaacatgaccaaactctccatttgcgtcgcccaaacgtctccgaggtcgggatctcagcgggtcccttcagatgacgtgttcgccgtcttggaaagcaacctgaaggtcacggccgaggtagtcaagcaggccagtgcaggcggagcagatatcgtcgtatttcccgagtattggctgcagggattagtgcaggatcgagaggtcggtccatgttttccagaaatgcttcttgaggaaggctgacgagggaatgtagtacctggtacatcctgccaggcatctcgtcgactatttacaacacctcgccaagagccacaatatatccatctgtggcaccatcgtggagcccaaagaccacaaaccgaccggagagcctgatatctctccattttcgcatctcatcgagcccacttcggcgaattccacacttagcgaatgggcgagctatacacagcgtatctatggggtagacgaatcggtagtgaccccaccggcacataccagggagggcgacgacaaggatatgccaggcgggaagactcgggaatcacatgacgatgaacgggtcgagcaaatgatcaacgtggcctacgtctttgaagcaggtacggggagggccgtgggtcgctatgtcaagcggaacctctggattagcgagaggtacgggcgttgacgtgaaagactgcatatacaaattcattgacagccgaagggtatcacagagattatctcacttcgggagaggacgaccacgaagtctttgagctcaacgggatcaagatgggcttgttgatttgcaagtgcctgagctcgctgcaagtcgatagcagctaaccctcgacttttgagcaggctgggacttggctcattccgccgccgctggcgcattggcgaggcaagacgtcgacgtcatcctggctccgacttattggttggcgacggatagcgaaccgtgagtgcatctcggccggtagcccttacgacggcgacaaatgaacagagaactcgcttgcgccacagtgcctcgaccgaattcgatccttcacccgattacgagctcgatctcgtcaagtcactgtgttacactcgagctttcgagaccgagaccgtactggccatgtgcaacgctggaggcccaaggtcacaaggtttcgctggtggcagcggtgcgtgggctcctttcaagggcaagctcgacggtcgcgccgtggactgtaatggtctggacgggcgtggctcagggtatgatcctgtagcagaaacctttgaagtcgagctggagagattattgaaagtggcaagggagacgtatcagattcgtcaagattggcaaaggcaggctgcatgatggggccatcgggaattgtatcacaggcagtcatctaaccgagtagcaagattacaacattatcaatttgctctgctacatcgaaggggtacgagacagaggccatatgcgccatattatatccgcctcgatgattgaggaacccggcggacaagaaacagaggtcgcgataagaaggaggagaagtcgaaaaggataatatgtattgcgcgcgtgcctctgctcagagatcccttcctcggccactgcgcaggacgcgtccaccaagacccgccgcgtctctcaaatccaagaggctcttggtcaggctcctcttcatgcccgacccaagcctcgccctgggagttggcatttcaatctcgggagtcaacggcggcgtcggagacggcgtcatggtcgacgtggggcctctgatactgctcgccttgaccgggctcgaaccgagcgagacggtgctcgtcttcctgactcggtcggttgccggtgtagaggctaatgacgagacgctcgatggatccccgtagctgggggtgccatgcttgctactcccactgccaggcgttgcgaattgatccgcaaatttgtctcggctgggcgtgcacaccggcttcagtttttcaccggtcagagcagtcaagtcgatccatccaagaggtggtacgttctcctgcccctttccgataacgtcgtccgcgttgacttcatcggtagtagggaacggcagcttgttcttcccgacgtgtttgatgttttcagccgtatatttaggcgtagccaccgccgtcggtatctttcgaacctcggcaacatcgacgcccaagtcgaaatatccaacgtcccgtctcgtcccggtagtgttggtcgcctgatcactccatacatcgaagccgaccgcgtgcacgtcggcgttcgagtcgggttcctcccgtggcatgatcgtcttgtccccctcgtcctcctcgacgtcgtccccggcattcatctcgatgtcggtcgccgctacggggatcgaaccgatcgagcgaacctttttgctcatgatcgggctggcgcttggcgagtccctccccgtccacgtgcgtttctcgatcgagatggccgacgtggatgtctttttcggggtcagcttgggcgaaggtcggagagtgggtcggagggtggacgtcgatgcagatccggaagcggaggcggagagctccaggttgacagagtagctcgtggcgatatctaattcatcgtccatcatcatcatcgagagcttgctcttaggttgaccggtttttttcgaactgttgtaatgaggatacccaagtcagccaaagacgtcccgcacaccgatcagtggagtcacgggtttacctgctgctaggcgaacccatcatgcccatcccgacaaataaccttctcgcgggggattgttgttcccacgccgcttcttcctcgtcatccgaatccaggttgaccgccttggcccgacgactcgggagaggatcgacgtccatcctttccagctgtgcgggcgttttgctcttggttgcgagtaagggtgcggagacgagctgtttcttattgatgtgttcgggggcgggagggacgacggcctttttcgtaccctccttctttgtcgacgaggacgagggtccagggacagccttggtctttccacacctggccatcttctccgacaatctcgatgtagacgctggtgtcgaggtcgatgccagccccgatgtgacctgcggagaacaaggcgtgcttctcagggagaatcccgagtgtaggtcgaacttgcaggggaaaagcccgagtggaagcgggctgaacggttttctctgcgtcgtcgtcgttgtcgtcgtgttcgaacgagtagaagtcgtctgttccgtcctcgttctggatctggtggcaggtgtcgaacgagatggttgtcgggcggaagaggaagaagactccatgatcgaatccgatggcgatgggacgatgatgatgatgatggttatatcgcctttggattccctcttttcctccctctctcactctaatcgcggagggtttctttctcggggttgacctttgaccaccctttgtccgacaaggcgatgtcccgggaggatcttgtgtggaaagggaaaggaagggtgtgggttggtgaattcgatgtcgctttggcggaaagggaaggagaggcaagagtgagggtatcgatggtggttgctgtccctgggcgatccgtttaggtgtgaacaagaacgagcaataaagtccgggatcttgaagaccaaagattaatttcgaacaaagagtttgaaggggtggggacgtattgtgaagatgtcgatgaactctgaggtggacgagggtggatgagggtggatggttgtagatgatcttcccccgccggttcggtcgattcgggctcgagacgcgcgcgaccgaaagacgcgaaaaacagagagctgaagccaaatgggtaggtacacagaccacccacgatgcccacggggtacaaggtcaccactctgcgacacgaatgatgcagcgatgtcgacatacacacaactttgctaccgtacaaagacaaagagctttgatctgtgtacaacaactctaccgatcgagatgaaacgaggttgatatgaccttgtctgtacacatacctcgcttttgtctgattacccctttcggtattcgtttggtcaaacgcgagagcacgcgcgtcatttcgattcaataaaattcgctttctcacgcgtcgcgttcatttaggtcacaagagaccgtttcaagagggtctttcgagaaagcgggaaatgtatgatcatcatcatcgtcaaaatggttggttcgtaatatggacaagaaacgtggtcatctacaacgacaaccgggtcgattattgaagcgaccactagattaagcggtggccttcttcctcttggaccccaccatgacatcttcgtcatcgtccgccgccccgaggccagctcggctaggcgtacccttgccagagaccttgcgttgctttttcgaggcgctccccgtgggcgtcccgatcggggtcgacgcagtttgttgccccttgcccagccccaaaggagtcgtcgggatggccgcagccttttgagccgcttgggccgccttggcacgaggaccgatgaaaccggtaaaccacccgcggacttccttttccgcgaccatcctgccctcggtcgaacgcgagacgtcacgcacgccggcaccggtcccggtggaagcggcagagatcgtcaccttggtccgagggttgggctcttcatcttgatcggcattggcagtcggcctggtcgagaggctcataaagtcgcgaacaaaggcgtcaaagagcaagctcgaaggcggcaacgacgagttcggcgcgtcaaacacgtccgagtacttgccacgcttctcgcgggtcatagcgtggttggcgctggtggtctcgtcgtcctgcatacgttggtgcacggtctggacgtcgacaaacgtgtccttgccaaacatctcttcccagatcgactggttcttgacaccggcgccggccacaatctcttgccccgtagacttcttgtccgcgtcgagcgatcgctcaaaggcttcgacgtgggcgccgaaacggacgagcttgccgtctcgagagagaccggtgtattcgtttgcgctggcagcttgggcagcaggagtgacgacggcttgaacgataccgaacggaacgacgtgcttggacagcggcagtggcgaggcgacggaaaacgtgtcgatccgggtaatcttcttgccagcgtcgagaaggacgaattggtcatcgtcggcagcaggaagacaggaagagtatttgccttgctctcgggtccagacggggtcgcacgaaagcaagtcccaaaggaccacaccaccggaccgctcacggtccccgcgaacgaccagatatcgcccggtagtgccgaggaagagcacctgagccaccgacttgacgtcggcagattcgagcgttcggacgagggtgtttgtcgaggtcgaccagagggtgagaagagacccctgagcgagtacgatgagggtaccatctggcgagaacgcggccgtagtgatggcctcggcacggtaggtgaaggacgacctgagagcccagaaggcttttgaaacgaggcagggcgagtcagctcgatggatctagcacaggacaatgaaaatgtcacgacgaggaaaaggacgaccaggtggcatctctcagtagatttgttttttgtttaagaagaagaaaacgtagtccacatgcgtatgttaagactgttgagctttgataaaagcatcattgtgaagccggtcgcggaggggaggatgggattggaagagcgaagtgcgtagcgagacagtttgacactaaccttcttcaaccgcggattgcttcttgcctagatttgaaaacgatgagcactggtcagctagcgtgtcgggagaaacggtaggtgacgagactcgaatcgttggtcccgggcgacaccaatcaggattgcagaacaaatggtccacacccctccgaagaggttcagggaaaaaattagagtttttatgtgatatgttgatcatcagggtgtcgccctcgtcggacccgcgaagcaaggaatggggatttcgaagaactcggcactcacctggacctttttgtatggcatcggcgactccacgcttgacggtccagacttttgcaacgccgtcgttaccggtggtcatgaacaaccaaccggcaccgcgtcgagtatccgggttggctcctgacaaggtagtgggtgcgaagctcatactggtgacgtcttcgaagccgtggacacggtcgagctgagtgttcaggacgtagccgttcttggcggtgatccagaaccacaacttcacggccgtgactttgccgccaccttgttccgtatcggcccggcgagtctcgtaagttgccatccactgaccagcttcggaagtcgaggtagcgggggagaaaaccacggacgagaccttgatcggggtgatctccctatcggcccgtgagacccgattcgaagggacaacctcgaggtcaaacactaaggacgaagtagaaggttgaaagaactgcaacgtcgacggatgagacgaagcgaggacgagcgatcgagtcgcagggtggtaggcgagcgggtactttttgcccaactgaaggtccttgtcgagcttgttaatccgggcccgtttgccgacaggtaaagcttttgaagtcgctgcgccgaccttaacgaccgagccatctacaaagccgctccagtactcctcctcggtaccctcagcgttgcccatgggcttgacaccaatccactcaaagctcgtggcaccgacgctcagtcgtgccataaagctgtttttgagcgtgtcgaggtgccatgtgacgaggacattttcctctccgcccgacaagagctgagacccgtacggcgtgaagcacagcgcgtggacgggatgggaatgccagtgcaaggcggtcgacgcgaggacgacctcggtgttagaggatccaaccttgaaccaagcgtctgtggatttaggtacgccctgctggtgcaacgatcggtatgcttgcgcaaggccgcctcgatagagtcggaccattcctcccttgtcgccggtagcgaaccactcttcgtcaccaccacgtttgaggatggaaccgacgtcggacgggcaccatcgaaggcaggtcacaccaacatccacgggaacgctgatccaggcgtccgtacccgacttgatgccgagtttccgcacaaacagaccagcgccggcaatcacggagatgtaggtaccatgaggcgagacacgcaggtctgagacgggcaggttgatttgacccaatcgcaccacatgtttgccgagctgaccaggttgaacctgaccagcggtcgtagtgatctgaggtacacgcagcgggatgcgaacgattttggtgaggacttggtgatctgaaggagcgggtcacgtcagcgataggacacaaagttcaacgggaagaggatctcgacatacctcggctagcagcatcgacagcaaggtaagcaaacgccttgccagactctactcctacgctcatcctgtcaatcttgacgcgatgttcgtcgacgtccttggccttgccactggcggcgagcatagcatccgcgacatccagagtcctgatcaacctcgaatctgtccagctccagaccttgatagtgccatcctcggacgaggtgacgagctcgagagggttcagagggtgcaggtggaaggaggtaatcggtgccgtgtggccggtattagaaccggtgggaagagtcgacacaagggcataatcgggcggtgacgattcatggatcagaatctgtttgccggaagctacgaaatggaagctgccaacgaacgtcgaggtcagatgttatctctgtcaagatgtgtacctcaacaactcaccgaccatcctgagtccatacgggcgattgtgcattctcgctacgttcggcgacagtcgaccaagcccacggttgatacgccaggccgtcctggtcatcggcggaatcaagctcgtcctcgggcaagcccaaagccgaagccctttcacgacgctcctgtcgagctttctgctgacgttcccaccaacgggccgctttttcatctatatcattggaagtggcatctgggtactttattcgaagcttgcgcttctttcgctcgacaacgacggtagggtccgacgccgtgggtacagcgcgttccttgcccttgatcgagggtttggtagtggtggacctcgaggggggtagtcgggaagacgaagcttctgcagacgataccatcgggtaagatttagcaacaggacgtgatgtaggtatatatgcgagagagggaatcgaggtcgatcgtacaggtttctttatagagcgtcaacgcgagactagcgggggggaagggggaggaaggcaggagcagcagcgtgaaagatttttacaagagaaaaatgttcaaatcgatgtgaaactagaagcgcgcgtcgtttggtggagggtcgacaagcgcatccggttgacgtaatcaacaacgtcacgtgatgccgagagaacctagaggtttcaccctagacaactaaagtcgaggtacattcgatcctcgagttcgagcttcttgactaccaaagcttcgacgcagagacgcgtagaatccgaatcatgttctccctcttcattgtcatccaattcgtgatcctggtcccgtacttcggcgtgagagaacgacaggctcaggttgtccattggcaacgtgatagtgtcggccggagaggggaccggatcatccgctgagccgatatcgctggtgacattctgagaaggcaaagcgaagaccgaggtcgcacaaggagatcgcgattggaccgtcttggtcggcgagacggctagctggtccatcccgtctcgaagctgatcctgctcgtcccctccgcctgtgacgcgccgaatgacacccctcacatcgaatgcctcttcgtcgctactcccatcatccatctcgcccagtccgaaaccgccaaccgaggattcaggctcggccggatcgaagtccatcatcgaacctgttccatcgccgcgcaacaggtccagccggcgggattcctttcgctggcaacgtttttcgtcggcccgacgcatctttcgagcgctcttgatcggtacagctcgtttctttcttcgccagacagacgtccgctcgtccaggtagaacccgctgacgtcgtcattgtcgtcatcgtcgtcaccgttgccattatcgtccgtagttccatctatatccttgtccgagccggcttggtcgctacgaacgaccgcctcgggatccatatcaaacatcccccacccatccacctctgcaggtgcatcggcctctttagcagccaccattttccttttggcgcgcttcctctcacgtctctcccgcctgatcatctccttttccgcctggccgtattcccgcttggctttccacttgccatccgcggtagtcgccgcggcgaactgagcgaggttacgttccttccaagaggcaggcgccgagtctggctggaggacgggccaatcttcatccgggccatacgtccggccattgatctccagagttcgacgaggcatgaactcctcctcctcctcgacatgaggctcgctctgactgtcgctatcatacaccaaacgcttgtccagccgtttcctctgtttagccgtcaggatctggacgtgcggctcggcgacaaacttgcacgtcgcagtcccacgttggttccccgtgagttgcgctcgtctggccttttcttgctgaaagggggtcaacctcggtcgtttacgcggcgctcgagcggccgagtccgtcgtcgccgtcttgctcggacccaagctcgatcccaagccgacctggagtttgccactcataggaggcggactcgtcaagctgatcacacggaggaccatgacggtggctcctagttcggcggccatgagttcgagcgtacgaagagaggattccatgagaggtcgaggaattcccacgagcgtgccatcgtccaggatcccgagctcatacatcgcctcacccccaccctcggtcaatctagcggaatgatacccgaccaggtcagccttcgtccgacttgtcaactgagcctatgctcagactcacctccatcgtaactgcgtaatgagacgctcgaagcgctgtccgccgaccttggcatcgagcttgagcttgtattcgatgtgcccggtcttgtccctttcagcaacgagcttggccgtactaccattccgcgacggcgagaggatgagagactgttgagagcgtggagggtagggtggtgaagacgtcgaccagggtggatcagtgctggaagccgaagtgtatgatgtgcccgagagggacgacatgaatgatctggctccggactcttgttcgtcatcatcatccgagcgagaatcgtcctgtctgaccgtatcgtcgcccggatcttttagcggagtttttactgatgagccagcgatagccgtcaggaaaggactaggaatgggtgaaaccttgatgttgatgctaggatccgagagagcctgctgccagggggatgggaatctggatgattcccctgcatggcggcgttctccgaacatgatctatggcccgccacggctcggtgtatttcgactggcgttcgactcccgaggagggttcgtattattggtcgaccagtttccagttttgctggggttgacggttggaactgatgtgtctgtctgtttaccttcgtattcgatagtgattcatcaagctaaggtgaacggcgcaggagctgatcattctcgatcgcgacgcgatgatcacccgtcccgaggttcgactttgctatctaggtcgagttcctacgtattgccgctagaaagactgtttcggatgtatcaaggtggagattcggtaggcacaatatgttgaattggatgatgtgggatcgccacgacctggtagctagctagctacctggcatggctcgacccggaccaccttgactcggcgatcgctaaatcacgtgacacaaggagcaagtcgctgcaatcaactattccaacttctagagcgttagtcaataataagtcgaattcaacatcgactcatttagcacatcgtatatctaccccgccctcccacttcacgtcgacccagctttagacttctgagatcgatctatcatagtattatgccatcgctatcctcgaaaagcaagccgacggcaacctcgggagctcctcccaaaaacgcctcgctcaattcgagcggacgcaagatcatccggtatcgcggccatcaatttttgcgacaacgtttgatcctgtccatcttgtcgggaaagagcgtccggatcgatggaatcagggaagacgaagtcgaggtcggtctgaagggtaagttcctcgaatatgaacagatgaagaaggccggattgattgaaaaggttcttctcgactcgatcgctacagattacgaggtatcgctcttgcgtctcttggaaaagatcaccaacgggactacgatcgagatttcatacaccggaacgaccgtccttgttcacccaggtctcttgcccggtggctcttatacccacacatgtccgctcactcgaccgatcggctactttctcgaaacactcctcgtccttggacctttcggtaaaagacccctggacgttcggctcgagggaatcacgggggaagaaggcagggatatgagtgtggatatgttgaggaccgtagggctgccaactctgcatctctttgggatcatcgaagggctggaactgcagatcaagaaacgaggggcggcgccgctcggaggcgggttggtcatcttcaaatgtcccgtggtcaagaatgtcaagacgctggatttcgtcgaccccgggaggatcaaacggatacgaggcattgcgtgagtttgatatgtcggtcggtcggtcgatcagcctggttgatactgacctcactttggtgctttgaagctactcgacccgagtgtcgccgcagtttgccaataggatggtcgaggccgcgaggtcggtgttgaatcggtacattcctgatatctacctgtacaccgatgtatacaagggagaggagagcggcaagtgagttatatcggtgctgatctgcggacaggccatccgcgcagtagctgaaccgtaagctctaccccgcagatcgcccggttatggtctgacactgttatcacaatcgacgacatcggcgctccatacggctgagaccatctctgtccctgcggtttctcgtgcaaacccctcggaccacgctaccgcttccgagcaggccttccagacccctgaagatctggccctgaatgcagcgagggcgttgttggagcaggttagtcggggtggatgtgtggacgaggcgtaccagtggttggtctgtctcctgatgatcctcgggaccgaggacgtcgcgaggtgcaggatgggaacgttgacgccgctcacgtgagtatccaacgtaacccataggcggagcaggggaaggttgcttatcgagctcatccgaattcatagcgtccaatggctacgcgatatcaacgactttttcggtgtcaggttcaagattacgccaatcgcgcagcatcatgccggaaacaccaagcagaccggcccgaacgacaatgttcaagacaagggcgaggatgagagcagtgacagtgatgacgacgaggatagggagcgggtcatcggaggcgtcaaggtcaagggcgtcgttgacagccagaacgacaaggtgaagcgtcttgtaccggaagaagtcatggtcagctgcgtcggaatcggatacggcaacatcaacaggagcacggcctgagcgatgggaacttcctccttgtatcgtatatttggcatgggcatgtgggttgtatcgacatttatggcgctccggacaatggcttgcagcgaccaatctcaaagcatcgacccagaacatcgaggcggtctggcttgatgatggattgagatgcacggattcgctgggcatgctctgcccaattgaacagcatcaagtcatcgacatcgtgacgaaccgcagaccaggtcatgtcttcgggaatgtatcggtcaatgggttgagatgccgcacgggagacgagctcgaggaactcctgcggatcatcgccgtgtcgatacgtgtaaacgtatggaggaccgatgagcgaagctgggccatgttgagcatattccctgacacaaaaagagggtaagtaagtgtttcaagcgcaaacgactgtcagtcttcgcatacccattgaaaagttgataaccacgatgtatctcttctgggtcggcatatgtcggcagcacgactggtgtcccttgacacaagctcgtgtacacagagggcgagatgtagggtcgaccaattccgaccatgactttgctcttgccgacctcgagttcgaattgatcgcgaggcagaggtttcattggtgtcacgccatcgggcacggtgaagttgagccaccctcgatccccgtccaagcggtcagtggccaccgacactggctccaagcccgtcgtcttttcgaattcgggccaaacgctctgtggaggcgccttgcgcttgtcataaaagtactctgccagcttggccaggatgaacgcgcggttgatcttccgctccggtggagtcaacgggaccgccgaacattctctctcgatcgaatatggcatgaatgtgtgatcgggataactgaaaggactgcgaggtattctcagtagagacgtccacgaccatctgcaacctaacatacgagatcgtccattctgagcccagtggattccaggaaaagccttccgggacaggccagtacccctcgcccgttttggtaccccactgaattttccgatcgtgtcaatatcggctctcgttccgttcggaagctcattcttacccatgtgaggacaaacaatttatatagcggaatagtgcctcgggaccgaccgatgccttgttgtgcagccaagtccaaatcgttcaattcatcttggctccaaacccacttttgcctgtcgccctctcgatttccttccattcctactgtgcgaatcggtcggccgtcggcgtctaccagcagatcggggaaccatgagctcgtgggttcgaaatcgtttcgagcgatgcaaaacgggtccgccatgcacgttagcataatcttctcatctacgaagaagtgggagctattgcaattcgaatgtcaatcacatcggtacgaagtgatgaaaaccaagatattatcactaacatcaggtcgggaatcccagcatgagcctgtatcatcccttcgtactcggatgtcgataaaacagtatagccttgttcttctagtgcgtcgatctggacctcgacgaatgagtcggccagtcagtcatcgaaagcttcaccaagcccttgagtgggaaggtgaactgaccatgctcgctgtccagatagcctcgcctgacagaccggcttttgtaaaccccatcgtccagaaccaccagtggcctacaacaactttggtagccttgatactacaagcatcaggaccttgagagttatcggagagcggttgtaagagacatcggcggagacgatcgattgcagctgtattcttctcctcctgatccttccaggtcctgagcgaaaccttccatgagatgatatcgtagaaggctcagcaaggctgctcacgcgaagcttttgtgtggtctccatgcgtctagctgatacagcagtcgtagtctccagcatcctttactcttttgctcgttccccttcgtgaacccaagtgggagtttcaggccgtcacagctgtcatcgatttcaggtgaaccgaaaagatcggcttcgggacgatatcgacggaatgcgaggtgccacgatggagaccctgatatttgagtgagattctcgtgcctagctaccaatgatcttcctagacgcccaggcctatgtagctccagcgattttccaggatagagatcaccccgggcgaggtgcaggatggtgacagcggcggcgagaaatagcaacagtcgatgcgagcgtgcaagacgttgcagacgttttcgggcggccgaaaacattgccaatgggaaggaaccgagagcggagcagtaggtatgctcctcatttgcacagtcagtgtactgaagtgatcatataaaattgagagcttctgatcctgtcgacggttctacttgttctgtcgaattttgcatccgctcacgcgtttcagattcgattttctcttttgttcgacggcttttgttcggacaccggaaatctcgtcatgcatcgttcattatattggtctaagttcgatcatgcggactatagtaattatcatttaacaagatcccaagaacgaagagaaagggaggtttacgtctagggttatccgatgataccatctagccgatgccatctttgcaggtcggacacctccatgcgtccgatcccgttaggatcgtccagaagccagacggtcggattgggagcgataagagacggagggtatagtgtccggagggctttttgagtgagagggtcgagtgtgctagcggatgttgatccggtcatgccagaggtcgaggcagaaatattgaggggtggcaagacgtggggctgatcctgacgcttgctgtggcgaccaagggctgcagcttggcgagtgtcgaccatgtcgtccaatttctcggtaggtagaggaatacaatgcgctaaccctgcgacagctatgtctctgctacgcgtgggtgccaacgccgcgatcatctcgaagatcgaggcattggagcgtcgtcgtgagcgagcttcgggatcggattcctgattcaggggttgagactccccagcatccaagaggtggttttcgtgctgaacttccatcgagagcaactccctctcaaattctgtagaggctgcattgttgttgctgcttccgctgattcgcttgtgcctgatttggtagaatgtctcgtacagcaaccatgccgccagcgtggcagctagcgcaatagctccgaggacccattctcggcgacttagcaggatgaggccgaaaagcagaggtataagtgcggacgtccgtcccattattttgagggcaatgatagataacaggccgccatgatcgcccttccagtcgatgtgaacgcttgtcgacagatgacgacaggcgatgaacgcgagtatgaggaagaggactaaagggatgctgatcaatgggaatatcggtaggtataagagggaaacggtgagagcgtagatgacgagggccaaaaggaccgagacatccaccgggcgaggctgtgaagctgcggacatgaacggatgtcaggacaagtaagcttgccccgcaatgaccctcgcgctcacctcggaagcgctgtctgggcgtcactttggtggctgatgtcttcatggctttgcttaatagccgtatgggttggagtatgacaaaaccgggaacgaccactgccaggttgattattagacaaaacagattccaagctgttccgaacgagcttcagcaacgactctgcgttcatgccggattcgatgcttacagaagaaaatgctgccatcagcaatatggcgcccggtttgagctccgtctacgatgttgtcagtagcatagatgagtgatgccgccaatattggccacaagccgcctgtgacgagctgaaccagatcccagtcagctttcattcatgaattgctttgcaacaccgctgactgacgagcatcacaactaagcctttaaatttggccagctgttcttccatgtctgtaatactgcccgagattttggccatttctagaggtaaaagcgaacgtttaatcaccatgcgccctttcatgacactcacgaggcttactcgcaatgccgtaacccgttgctagcagtatcaagctgatggctaacgcgggaaccacactttccgccaggcctgatggtagaccgttgtcacgcacaatgggccggaacagcccaaggtagtgtgagatacccggtgctgatgcgactcccagcgctacgaatggcgttactacgaaggtcggaatgttagcgacgcttcgtccagggatcaaaaggcactggacgaacctagtacacacgctgctacagtcaagagcgacgtcaccacccaaaagccgaagattgagccgttctggcgttgtaactggtcccacttgatcgattccctgcttgagccaacgatccgtgtggcgtgaggcaggcgtagatttcgaccgattactagcaagccaacgattcccttggccctggtcatatcctcgtacgtcatactctgggcttcggcgacctcgtcattcaactgaatgagcagcggtctataccgtttgatgtcttggtagtgaatgcccagatcgagtggtgagacgccagagttgggtcgaatgacagattgatgtccctcaagtatctgaggatcctctgataccatggcgaaggatggattggtgcgcttgcgaggaggcgcacggcggaaactacccccggaactgataggttggaagccgatcggctgctgaggtttaggaggaaccgccgggggcccgggcaggagaggttcttcgacacccccaccgcattcctgactcgtcgatggtctcgcgtcatcgggcgacgggaaccgtatcgagtcggctcgggacatgggacgaggctcgttgaagtccggcccagatctgtttgtgtgacccatcaatgagctctcggtgtctggcgtagttggcatgccatgcggttcaagttgtccggttgttcctatcctgagatcggccccaacgggtagctcggagaacatgccagaggatcgttgtacttcgagaaaacgactcccaacgacgcgattcgtaactgcttgcgtaaatgtaggctcacggtcttgaagatcatctctccctactttagatatcctcgggatcaagtcatcagatgtcgaagggaccgctggcaagggtctcagcttgtaaaaagtcttgggcgctacatattgcgtcggcgcattgatcccgcctgactcgcgtctcgtggaagagtggcgcatacgtttctgcaaaagcgacctgtcagtccctgtagcctgtccaaaagtcaagttacaactcaccggtagaaagctcgagcgcttctcggatggagactcaggttctggtgctctttcagcttgtggtctctcggccatagggttagccttgaacgatcggatataccgggcctctgcggtttctagcttttccaggacctggctgcggcgtttgacaaggtcatctaggtggctggtgtcgggaatagcatagatggcgcgaacgatggcagaatcgtcgctactatcgctattacagagtagaccatgtttgccggcgagatccatggcttgtttctcgctgaccgtgatctttctcgatcccgcatgattgaaccggatccaccagatttcctctccatcacaaatggtggagagccagctttgtctcaatttcaacagcgagttcaacgcccgggtgacggtgacgagagctggagccagtatcaaacagcaggtgatgaccaggaggattatcagccgggtcttggcattggaaatggccggacggatcgtggaagatagatctcgcagtgtcagggccggacccgccgtcatcgctggcgactcgggcgatgggtccagactgttcaagagtcgcaatagtgataggtccgtgtgagaaccgagcctgccttcgtagcgcctggggggcgatgttttgtcgaggcaaggagtgccgacgaggaataaaggtagaccagcggcgagagcgacgagaccagcgacggaagcgagtttgacggcggtgacgatgggtgcccgggagaggtcgttgtcggtggagggcgtagacgatctgtcatggatccagtggcaggagcaatacgagaatcggctcgagtaaacgtccacgtttgagtgtgagcatgttacgacaatcaagacccggctcacccgtctagcccaagagctttcctcggctgatatatcgcagcaagggacttccttcctcgaaggactgcccatagtgcccaaaccagtaagccgaagagtaaaccgagtaccagcgagcttgctgtaccggctgcctgccagtcccagtctcctgaacaggatatcgactctgatgggccggacgacgaatcgaatcgagttggcatggtcgccgtgggtatggggaacacgattcgacttgctgtagcggccaaggggacttcggtggtcacaaaggcggtttgggagactgaagtgattaccggtatggatgccgtcgaggtggtcaataaggaggcggacgagaggctcttttgcagggcgaggcaggctgcgtctgttgcccagacatttggtggagggtctacgggtcccgtcgatgctcgcgagttgtagtcggactgcgacgccgtgaacctggaaagcggagagaaggtgggcgttggtcagtaaacggatcttgtgcatgaaaggcaaatgggacgtaccatgaagcagtgtaccattcgtccgcccaggaaagggtctcgcctgcgccggcacaggctgtgtagaagtgtcttttttccatctgtagcggttcactttaggagcttgttattcgctatcgacgagttgtgccaaaggtatgtgatgtcgaggtggagcgagataagccggcgaatggatgtgtgggaaatggtccggttgaccggttgggttggaagaaagtcagtctgggagagcggatcggtctgtgtaaagcggaagaaatgattagtgtgggtaggaccgagacgtgatggtgttgtccaatacggagtagcatcagagtgcgtgagattgatcacgaggagccttttgttcgtcagggaccctgatcgacaggccgaatttgtggaccacagttggcgggcctacttggactgaggctgcaaccaggttcgggtgtatggcaaagcaaaacgatatgcgagaatgaccggcatgctgttcgaagctggggagaacagtacaagttttgattcaaaaactttgatcaagtcgggaacggagggggaaaaggggagggcggcatcgtcgaacgcgcgaacaaaagacgcaagagaggtgaaacgcgacagggagggtcatgcgggaacaatagggcgaccctgcagtcgtccggcgagcagccgtaggtgtacggcttgcaacccagcaagatgtctccctggatttgctgctgagcaagacttcgcttcttgagtcgaagccgagcaagacgttgcgccgccgtcattcgacgggaaaaacaaacaccaacgcgcgaaaaacggacgacgttccgcaaaaatggcaaaaatattgcaccaggagggagtcgaaccctcgaccgtcgagaagcaagagttaccgcataagctcgatgcgctaccaactgcgccactggagcccgtcaaaaaacagacccgtaattccctttccaaataccattattgggggcgagtgaatcgttttggcccgcggacgtgcgttcgcaagcttgcgagtgctctcgtgtcttcccgggtggcatccgcgcgccgcacagaatttgacgccatcgttcgcgtcgtcccctagcctgcttgaactctcaccgcacaccttcgaccattaaaagtaagccacaatgggagttttcttgtacttgaaggtgttcacatgaatgtcaggcttgcaagacgtatcttaagcttctgtatttgttttcgcgtcgcgcttttcgcgtcttgcgatccttgcttcttgtagcttgtgacccggcaaatcttggactttcaggctcaaaggcatccgaacgtggcccggcaggaagagcagagcagagcaagcaaaactgatcatgtcatttggctcgtcagaagcataacaatcaaataatccctgcctttccccgccgtcacgatgtgagagtaaaggaaccgggcgggtgaaacaagaacaagtggatcgtggcttgcgcgcgcgatacgacgatccttaatgtgacgaccgacgaccgacgaccgacgaccagcaactggcaactagcgaagcttctccctccacgaagggccggaagggcgaagatcgtggggatcggtctgtttcgttctggggctacaagcgggcacaaggtgaattgaacggatcgatcagttgagcagcatgacgtaactcgctaccgcaatactgtcgtcgcaagaaatccatttgtctcctttcccacaacgaaatagtcacaaaagaatacacgccgtcaagacggaccacagatgggatgcgactgtgagggttcgccgctatctatcatactcaagcggaaacaatatcactgaacactttacatgctaccatgagaccaagtcgcttcgacgaatatttgcacgacgaccgcgacattcgagttgaaagacgacgaaaggcgactcccggcggcaatcccttcttgaccccagactcttcgcgttcggacccttcctcggaagcaaaaaatgccgtcatcgcctcggtctcgaattgcaccgaggaggtcgggcaagcatttcgaggggaaaggaaggggtgggtccaacgcagagttgtccaaatcgacccatctccttgttgatctacaactgcaccgacacatccggacgacaccaaggtcacgaggacactgtgccgataggacctcctctaccagccactgaccgagtacaaagctcgagctcgatcgcacactcctttacccctggcgactacttccgcaactcatcaactacatcgatacgccatgtccaagctcttgaacgcctactccaattacctcgccaggaagccactccagggaaacgtcgtcacagctatcgtgagtgaacccgtgatgcccatgaggtcttatcggaaaacggccaacgagctcgtcgcacttatcttcacctgactcgccgctagggcttgtttggaatcggtgatgggttggctcaggtgatcgagggcaagcctgggtatgactttgcaaggacggcgtgagtttgccaatgtcagcgtgcagtacgatcgaatcgaagtacctgaccgggtgacgtccgtagccgactttgcacttggggaggagccatgtaagtcgataagcgtggacctacgtcgagcatcgccgaacccgacctgacctgactcgaacctagctttgctccgctcgttggaggattctggttccctctcctgaaccgcgtgaccgtgggcaacaaggctaccaccgctcttgcccgtgcctcgatggaccaattcgtcgccgctcccatcgtcttgggcgggttctttgcgtttgccggtatgttggagggcaagtctgtggaagatgtcaagacaaaggtcgagagcgtgagttcccgcggatgtcagatccacgagcaggtacgggggattgacatgctcggttcgttggtgcgggatctagtcttggttccctacattgaagaccaactggtatgtcggggtcacggcagcgaccctttttcaattgtcgactcgacggctgaccctcgcgaccgtcgttccaggatggtctgggtgcctttccaagcggtcaacttggcaagtctggcatgagtttgcggcgccgacaggtaacaagctaaccactgtctattcgtggtcatcggggcaatgatcgtagagcgtgagtcgaccgcgctgccgactgatacgttatgaacatattctgacgaaccccccggctctcactccaccagatcgttccccctcaataccgattcccggcgagtttggccatgaacattccttggaacatttatcgtacgtcacccgcggggcctccccctcgaatcacgtcgacgaaagggctcgaaacgctaatgcccggcggttcgctcgttcaaaaagtctcgatgcaaaacgccaagtcgtcggtgccccctgaacccgtcaaggtcgctttcggcgactagtcgggtgggcccaaaacgcgaggatagatattgtgctgttgcccctgcatgtaccatcatatagagacgtagcacgtagacgagtttgttgaaggtcgatcgtggtgtgtgttgaccgttttctcatctagctcctatagatgatggtctgggaacgacgtcatcatttagttgtcacgacttgaacttttggctcgagaacacgcgctcgagccattttcagcgacgaggcacgggaaccacaacgaccacgaccactcgatctattagttgatggcgaggttacaaccggcatacctatgccacccaactgattacccccgcctacgtctagcgagtagtgtacagagtacaaccgacttgccctgtctaccccgcacaatctcgtcgtcccgttaccccgcgacagggtcgcgatcattcaatccaaggttgccaaccaggtgaacgactgagcgacgtgcaggaccaacatctacacagccctcgaccttcgcgctcgattatactacacgatcctcccgtatcaacacttagtcaacccggccgatgaacccctgcatctagaaacctcgacctgatactggacgtatacgcatctatctctcgagcaaacggccctcagctcttcgcgggtcacagcggtagaccccgtcgagatcgacctcgggatgcaacagaacctggctataccattgggatcggccccggctcgacctcccaggagagactctcgcgatggggagacgaccaacccgtactcgttgccgcctggagcagcaccgtcggccatgtcaagcgatggtcagggtccgggttcgggacccgactttcatcgattcgcttcacccttgaatggcctcccaccgctgttggccccacaggctggcatgtcgtcgtcggcgggtcggatgaagaggataccggctaccactgccatccaaagcgagtgtcgtcggtcgttcgtggctagtcgatcgaggtggccctgtggctaacgatacatgcgccctttttcaacttttgcagccaactttgaccatcctcctcgacagcgaggcgatgatcacggctacatctcacccaactcggctcctcctacacactcgacgtttgccatcgatcttaccaatgcacctcctctccctcccaaggttcagtaccgctcgcccatcagtccgacaaaaccgggcatgctcaggcagtcatcgcgcaagggttcagcctcgcccgtcagtctaggtcagcagcagctccagcaccctccatcctccgacccggtcacgatctattcgaggaccgccggcacaccacccatctcgttcggaggcgcggccaggcgcaacatgagccccatcctgaccaactcgtccggaccggcacatctcgagcccccggcaagaggtcctcccaggcaggcgtctccatcagcgtcgtataggagcgtctcggatacctcgtcccgagcgaattctcgatccaactcgtacgacaaccgtaacccctccccaggtccaggccagccatccatccatgtcatcgcctcgtcacacccggctcagtcggcattcaaaccagcttccaggtcgggatcggctatgggggggcccaggactgcaatggataaggagctgccccggttgaacattgccaacacgacgggcccggcgaggacgcctagcccgttgaacccgagcgccaccatgatgacctcgccgacgagcatcatatcgcccacgctggaattacctcgacggggagcgtccctagcgacgagaacgcccgtggacccggcgtcgatggtctcgcagatggaaccccagctgcgtcaacctcgacctctaccgagcgtcatccagggacaggccttgacgtcctttggctcgggacattcggcagaccccgtagcgatgatggagaacctacacatgcctctgagaacgacgccgtcccctgcgacaccttcagcggccgagtccgagggtagcatgctgaatcgacccaaacctaaacccaagtcgtcggcttaccggtcatcaccctcgagatcccctgcacccccttcggatggctttcaaccgccctcctactcggaagctcgcagcgtgtccaacgtgggtagacccggcagcgcgggactcgagcggatcatggccgaggatggtgtccaggcggctttgctcccccacctccccatcgccagctttttggcgctgatgacgaccctggaaaaggagacccgtcgtgcgatcaacggcgagttggtcgggaggtgggtgacgtcgagttgggggatggagctcgcacccagggacgtgcatcaatggcccggtctgggcgtatgggaagggttccgtgagccgtcactttctggttctccggtcgtacgatcacgcactgacaatattctactcggcgcccgtagtggaatccttgttgcacaatgccgaggcgttcagcacttacccgtcccatttcaaaccgttgctgcaacacctctgcctttcctactcgctcgtcgtcctactactccggacgctgcccgtcgacgctttcccctcgacgccaccctttgcgttcgaggacgagcaaacgctggcttcggcagggatgcccaagtccatgtccaacctgagtctcgccagcgcggctcattcccgtcgaaatcagggaggcggcgtgggcggtagttgggaattgtcatccaggcccaagcacgtgcctagagcagagcgacccgtcgagctggtcatgccagagccattaggtgcgccaaagaacgatggcggcgatcagatcgagaccatcttgcccgcacccaccacgacgccagccagtacgcaccgccgacgcagttctatcggctcggcatcgatcatctcgtggacaaacaagaccaggaggggaagtgcgcccagcgaagctggcgtcagatcaccgagcagcagcattttgaacaagaaattcccgccagtctcgtttccctcggcaaagcgctacgtgttcaaggggtatggcgacccggtagcaccccgtcagaggactacgtcggagagtggcgggagtcgaccggggtccatcttttccgtcgaagaatcgattgcacccagcaggagccgtgttcccaagatggcggccaacaagcgatcacccagtggtcacgcgggcgacatgggatcgtggggtcgtgccggacccgggacaggacgcaactcgcctagcgctccgtcgtcgtcgcagctacgttttacgagcatggcaagtgaccgcaacctgaacagctactcgcccgaaccgtcacgttggggggccaggacaccggaacccatagagccggcgttcgaaaagccgatcccctatgtcgtcgggagggccccgatcctgagggtctttgtgccgttgtcacgagagatccccgcctggccttgcgcagaaggagccgcacaggcccgtcgggaactcgagcggtgcggcgcctggggcaaattgaggatcggagacgtcatcgtcaacaccgccttgtccgagccgcttttgccccggcacctgatgctctacattcctaccatgcagccattcctgtgcccactcgaatacaggtttggtgagcaaggacatctgccaggttacctcgacgcctttacgatcccgccctcgttctactatccgctcctcttttcgggatcctacgtcatccacctcgatcttggaccttgggccgacgccgccgtggacacgctgagattggcctttgctcgaagcgatatcactaccactcggggcgacaaggtgacggccaagagatacctgcacgtcgtcgggttcgaaatcagcgcccgcacaaaacaccaagctgtagaggattggtacggcatgatcagtatcgaggccgaaggcactgccgagggaaggagggaattattacggcggttgggaagggacaatcagggtcgccgtgtgcagccccatcgtgggccttacgaggtggttcgggaaaagagtctcggaggaaacatctggttgaagtgagtctcgtctggtagtccaaaagtatgagcgtaaagttgacatttacccggcacagactcatttccgaaactacaaacgagcctcgtcgtatttaatctaattctcgccacgacgttttataaatacagtcatcacgtttcggtcgcgggttcgagcagacccgatcgcagcacctttctagcagcattcctttgcgcgtccgcctttttctgcccagcgccgataaacttgcccagacccgtaatgatgaccgcctcgtgccgttccatcgacttgggcgtgggttctttgacggtttggtattgtatggccctctgcttgcatcgttggttgagcaacaatttcggatagggaattacggcggacgtctcgatgtcgccctctgttggaggcagccttgtaacctctgcttccgcctgtttgacctgaaccgggccctctcccgaccctgtgtgcacctcgacaggtcggacctgctttctagcatgtctgcgaagggtcttcattgcctgcttgctcggcttgccaaagatctctggcatgtcgacacggagcgaattcattttgcgtcgcagaacgtgcagatgcctctctgcatggtgccggaattgtctcagattgctcaacaagaagcgatgcgatcgttggcggacccgagcccccagcaaggacatctgagacctctttgttcgtatccgtttcttgacaccgcgtataccagcgaggaaccgttccgccgtctgacgcgttgtcaggcgcatggatttcctccattgctgtatccggcgggtcaaaaggtaaaaccggtccttcaagcgggcgacccggacgagaaggtaggtaggagtctggcgaccagtcacgaccgtccaggccttgacacggcgtaatcgagccagaaacaatcccggcgttcggcgtctcagtatacgaatccggctgttcagtctgtgcaacctcttccgatacgatgtcatgcgtttctcgacacgttggcgcacgaccgtcacggatccatgcagagaccgaacgaaacgtttccactttcgctgcagccgcgtcagcaaatgcgctggatgaaggacgttgaccgtctcctcgacgttgacgagaatcggtgcgggtccgtaaagccgtcgtttgttctcctctagcatctcgctcatgacggattccaaccaggtgtatgcctccttgtccccgagttcttcggtcatgaccgcaagaagcgattccatgacgtcttccagcacgtcctggttgagtttatcgagatggcaacgaatgtgcttggccagcccgatcgagagggcgatccgagagagtgcggtgcctcgtactaccgtctgagcgagcctctacagtcgtgacgatggtcggtactggatccgggcaaaagaagccacaccgtcgactgaccgatttctcacccagcttgagttgagggtatctgcgcgagatcatcctccgagccaacagctcgagtgcagcgtcgcctacccattcgagctccttatagttccatgccgagctgaacgaatggtgtgtgaatagcttgcgtttaccttcactcgacaaccggtcgaggatctggagcggccggtcgtcgtatacgggcagcgattggcgaggccagagaggcttccatccgcccacaatcgattgtgacatcgggtaagccggtcttccaccttgctgctggccgaataagactcgacgaagcctgtcaagcgggaaggattaatgagtgacgtgcgctggacccctgtcgagctgagaccaacctgggaagcagatcgaacgacctttgcgcgtggagagttgacgaggtcgggcggctgacctgaccacccggctagacatcgtagtcgacctggtgatcaaggccatggccaggttcaactatttcaagatcttgaggctcatgccatgtaggtaaggtgtagggcactcgaagcgggtggatcgagaagcaaccatagtagtgtaatgtatatacctctgtccaagtaggtagcctactctcttttgtctctcctccacttttgtttactttgtggcaaattcaacttgtttgccccgatcaaggaatgtggtatcaaggatatgctcatcatcatgcatcacatccagatcaagccgatccagtgtcaaggtatacatcgcagcaagctgtattcaagaggtgagaggcaaagccacactccaggtgggtatgagccgacacctacccacgtcatgcaacaagacctccttcaccaactacatcatcaacaagaacaatctcggcggtctatcagcaatgacaatgcctggaagctatgtctcgtcgcccatgccgagttcgggccaggttcgaagggacagtctggaagaggaagcccaacggacttttagcccatggacaggcaagctggtctttgcaccggcacgatcaggcagtcgcgatggcgacgtgatgatcggtcggaggagcggggatgacgagccaagtgaagtctcccgcagcggctcatcatcgggtcggacgagcttttccgatcaagaaaacgaggtgcaacatataaagactctcaatcgtatcaacaaccagaagtctggccaacccgagactccgcttgacgattctcacaccggttcgtccctcttgatcgaccggatcatcgatcttaccctctcgccatcgccaacgcggataccaaatcgagacgaccggatgatcactatccctctccgaccaagaccaagggctgtcgctcggtacgcctcccccgagtgcaagaccgccatgagcccattgaagagcaggatcggtggattgacccagccaacggtgaccaacaagaccttgcatccgttcttcaatccggccgccttcaaaccaagctcgccgtcaaactccttgcccccgccctcgtcgcacctcccgaggttgtcgatgaggacgcttcagccgggtagtcagagcaccgagtcggctacgtccggtagtcaggccagtaccagcacctataccagcaccagcaccagtaccagtaccgcttcacccgaatcccatcgtcgatcggtgcaggtcttgcgagggtcgcaaaactctcgcgtggtcatcgaagagaggatcatcacgggacaacgagcgtaccgtacctggggagctcgggaccaggtagaggaagtaccagacgatctggttctcgactttgatgcgttgaccttgggtcgagatgcgatcaaacccgtatccgaacccgccgctcctaaaccgaccatcatcaagtcgagcgactcggagagatccagaaccgaaccgaccgagccgaaacgtccggtcaactacccgttcttcgacaccgaaggtctccctttctttacctaccaatcgctccgaccgaagcctaccctggtctacacatgctgcccggacgagactgacgacctgttgatgttactgcaaggcgatgtcgtaggctttgacatggaatggcccgtctcgtatcgcgcacaaaagggtgtcagtggagcacggaaattgacggacaagacggcgctggtacaggtatgcgatgacaagttggtcctgcttttgcacttgtccaaaatgaggagtgcgtgtcgtttcatggacaaagttcaggtctgttgctgacgctcgactttgatgtccaggctttcctcaaggactgaaagacctcatcaactcggaaaagatctacaaagtcggagtcaacatcaggggtgggtcgtcgcatctcctagtccattctaccgcccctgaccttgaatgcaacatgaccccttaggagacgcccggaagatcactcaggattttccctacatcaagcctcgctcaatgctcgacctaggttttctagcccgtgtcgtggacccggaaaattgcggcgatggcaagggtctcatctcgctggcccgtctcactcgagggtatctcgagcacgacttgaacaaggataacggtgtcaggaagagcgattggagtttagcattgacaccggaacaacaggaatgtgagtgcgtcgagcatacgaattttggcgatccgagatctcatcgtcatgtctactcggctcagatgcggccaatgacgtcgtagtgtcaatgtcgctctatcggaaactgctggaattggcccaagaccggaccgtgcgtgtggaccgagacgacatctgtcgacctccggatcctgcgcctgcagcaacgactcgaccgccttcgacctactgggcccgtcgctccagctggaacaggaaatgacgcaaccatgatgaaaaataacgacaaccgacggggactcgcatctatatgacaatgtattttttggtagaaacaatcgacgacacctcatcctacgctcactctcgggagacgtcactgcgagcagaggtcgatgtcagcgtggtcattccatctggcgcgtgccgaatcaggaccatcgactcaccgtccaaagatcttgaccttcatccagtcgaggatgaccaaggttcggttacgggcgctgtacaaagtcgagacataggcagacctccagaagaggtacgtagcgacactgaaatcgatcgagcgagagaatccgtcagcgcgtgtactcgaggctctgacgagggacgacgatcgactcaccctccacttgcaaagtttccgttgaaaaagggcagatcggcaatggccttttcgctaccgatgtaagcgagcgaaccctggtgagagtagtggaagggaggcaggtcgagcgccttgttcaatcgcttgacggtacgctcgacctcttcgacgggcgccttgtcccgaatgtccgcgagctgctccttgagcttttcagcctgagccatctttgcaaacgttcgtgcgaggtaggttccctgttgactagcggcctgggcggtaggggcgtaagaggtggcggtacagtcaccgagggcaaagatctcgggagcaccggcgagacgcatgtgaccgtcgacgaccaatccacgtcgctgagtctggtgctcaggcaacttggccatcaatccccgggtgatctctcgggaggtgtttccggtggcccagacgaggagaccgtaagggatctccttgatctccttgttggcgtcctggacgatgaccgacttttcacgcacgtccttgaccatggtacgggtgaggacgtcgatcttgttctccttgaaggtcgactcggtgtactggatcaattgcttggaaaaggcggggagcacgttggggagggcttcgatgagggtgatcctcagcttgtcggcgatctcggggtaccacttgcgcaagtcgtcctgcagagcgacggagggcgacgtgttagctagctggcacacgtttcgctcattcggcgagatcccgtctctgcggcagtcgacttgactcacgatcaggaaatcgtgcaactctccggcgtactcgacaccggtaggacctccaccgacgacgaccatgtgcatgagcctctcgatctcgtcctcggtctgtccggcaaaggcggccgtctcgatacaatccaagagcttgcgtcggatcctatcagcgtccttgagttccttcaggaaacaagcatactccttgacacccttgatcccgaacgtctggttctcggcaccgacggcgtagacgaggtagtcgtaagggatggtcaccttggacgaggtggcggtcaactcggagttgtctacaagggggtttatcggggggcggtcagcgactttttggttctatacgacgtgtgcgcgcgggaaccggacgatgcactaaccctcgatggtgacggtcttgttgacggggtcgacatcggtcgcctcggcctcgtaaacggcgaccttgcgcttcttgtgcctcgtgataaacctcgtaggctggatgatcgacctggcctccaaagtgcctacggtgaccgaaggcaagagcggggagaataggaaatagtttcggggcgagatgacgacgacgttgtattcctcgttgtcgagctgtttgaggaacgaggtggctccccatccgttaccgaggacgacgaccgtcttcttcttggggtcgtggtcgagctgagtaccggggtaaagatctttctgggtgactgtggaggtacggatgtcgagggggtcagccgtcttgcgcccgaaatcgggtcgagcctcggaccaggagagacccggaacgtacagtagataaaggtaccggctccggctacgacaaagaacaggacacctcgagcgaacctagttcggaacctgccgaatccaccctatgatccgaccgccggggaagaacaaaaacgaaaaaaaaacgacgacacgcaggccagctcgtttcagcctacagggttcccctgaccacatcaccacgcctgtacattccgccgggggctcacctttttcttggttccctccttgacggtaggggcggcatcggtcgcggggacgacggggggagtggtaggcgtgataggggtctgggcgtacgacctcttgctcagtgcgaggatgggggagacgggtcggatcgacctcgaggtgatccgtacgggggtggagaggagaggtcgggcgaggttggctagaggtcaggcgatcatcgcgaggtaggtgatcacgtatcagcgtcccggggattcacaaattcgtctcggggacgacgatggtgataatcgtcgtcgtttccgtcatgaaacacgagcgactcaccgaggtgacgagcagacatgatgaatggcccttctagtctgaatttcgaatatgaactggtggctgggttatctacggactaatcgaaaatatcgatcctttcggtgtgatgctgccttttttttcgaatagatcggatttgttcgggcggggtcggtcgaggcgaggttgactcgaggtgtggggcggggaggtgtctcgtgtgggctttatcgagggagcgtacgacaggagggaagaagggagatgacgaggattgaagaagaggggtgtagtcgcactcttgttgatgtgatgttgtatgtcgttgtcggtgtcgttgtcgttgatcgtctatgatgatgatatctcccctgtctaccctctgtagcagctgccctcgcctgattcgtcgaccctgccactagcgaaacaggagcagcctcgagagattgggttccaggaagtcgagtcgaaaacatggaaaatctcgaaaatacgcgtcgcctcagtcaaagatagagacagagacgagccacgagagaggcgaaagataaccgccctcgcacactcccgcttgtagacgggaccgggaccatgagccacgagttcggtccgaacaaacgaatctcgtcgcaggatcggtatagcacaacgcgtatacagtaggtagtagaaacagtccgtaatctcacgacatccaatccacacacacacccggtctgactagccgtcaagggagagatccccagcggacctcctcggtcaacccctcccgcgtcgcctcgcctgacctccctttttcccaccgcctcccgcgcccatacccatcattcccggtcctccaccagcaccaccgaccttgtcatcaggacgtccatagaccaatccaaacttgtccgtcaactaatacgacgacgaataaatcgtccgaccgaatggtagaaagatgtaaacctcgggatcagcgatccagatcgtcttttgcttttgtcggaggacatctcggtctacgccccgcgcgctcggacgaatgatcggcgtgttatcgggacattcgaggtcgggtcgacgacccctcgccgatcgttcttcgtcgtcttcgtcgtcgtcgtcgacgtttgcactcacgtcgtttagcccagcgacctgtttcgtcagactagccaggtatcccatcaactggacgtccgtgtattcctgcccgacccgcatcacgtcacatcacgtcacatcacatcgtttcttatcagccactcgagaatcccgtctggtcgatccggtaaacccgagatcaatctcaaactcacggtcaacagttcggccttgaaatctcgttctgacatgacgggcagacaggagacgagggccatgatctctctcgtcactcgatgatcttgtgggatggtcgggtctgatccgggacctcacgtgtcagctcatattgttcgcagctcagggccacgagagagagagacaggggactcgccttggatggctttgatatagtcgagtaggacgagcatgcggtcgtgtagcatcttgatggcgttcctttgcgtattaagatgagcgatcactatccgatcgacccggttcgagaggaaaacgcgaccaaagcacaacgcaaacatgaaccgcgtgacgtcagcttgcagttcgagctcgaacgttgtcagaagttgaataaagaaagaggaggtgcactgacgaccttcatccccggcctcttcatcgtcgtcccctccaccagccttggccgccccgtccacggcgatccgttcagcctcgcccgtctcgatcgtatacgacagttcgaggaaatgttcttgatcctgagcgagcgcggattcgtagatcctcaaggggaggtcagacgaggtcgaggtcgacgtcgagttggagttggagttgggtgggctcatcaggaggaacaacggggtctccaagatgggcaggaactgggttcgagcgtcggaacgtcagccagagtacatatcaagtcttgaaggcggctaggtgggcttgcctgtttatgaagctcgaaatcgttgctcgtaggagattcgccgatcgagtaccatccgaggatatccaatgtggggaagacctccttgtctacgaccacgaggatgcgagtgtgggtcagcgaatcgtccctctcgaacgagggccgtcaggcaggagcacttgcactgagctcgcctcttttccagaaactccatgtccaaccccgggctactcgtcgaagcgtcgtccatgttcacatcggggaacttgagctcgaacgtattgatcaccgagacttccctgcccgactgagtgcccaagagtgctccaaatgctatactcccacaagacaaggcgagaagattcgtcagtcagctgtccacggcacggtgaagcgaggttcgaaaaggtcactgactcttgtcccctccacgacgtagcgagttgcgcatgtaatgctcggagatgttcaggatcggcaaaggatgtctgtaatgacaatcgaaccggtcattcagtattctctgacctccgattcgatcggcaaggacgtacaagctgattgacaggccggtattgcttgctaccggtttcgaggaagtcatggcgagagagagggggagagcgtgttcgtgtgtgtttgggtcggtcgtgaaatgtagtcgtcagaggtcgtagagtggtggtcaatgattgcgtggattcttcgtcgtttgctgtgaatttcgttccacagcgatacggaggctatcagttgctagattgtgggtaataatcatgataatgtgcaagggaaacctcgcgacgacgacttgggacttgtgttaacgacgaggttacgaatcgaagtctgattccgtaatagatcgattcggaagttaaatttgattccgaagattcaactttgaatcgaccgaggagtctacggtcaagtacaggactatcaaccaagaaagaagaagaggttcatacagacaaaatcgatcatattatcacagtcgtacaacatcactcgaccgcctgctagcactagacgacgcaaaccttcaccatgaactgccggaaaaacattgctaggacgctaagagccgctcctcgacgttccatctcaacgtcggccccggcactcgcccgcggaaatgacgctcgggatgacacccgaaggtcagacccatgggatatcaaaaacgtccagccgttccaattcgacgacacgaccaccctaggccacatgatcttggaaaagcagagggagaagctaggaagtctcatgaggatcgaacaggatcgcgagttgctacgaggtgagcctcgtccgcgttggataggcgtcgaacaacgaccccggagagctgaccaggtcgacctcttgcgatgcccagaacgggccaaagcgttcccttttcaagcaccaaacccttctacacattacctccgcgtgacgtctttcctcaatacctctgaccctacagacccactctcttcgaaaaaactcctccgcgttcccgtctcccgcctcccgctcgccgggcccgagaacgtgaaccgattcaaactcttggctggaacacggtggatcccgcccaaggggacccgcgcggacgggacgttggcagaagaggccaaaaagcagctttccgaggacgatgtcgaggggtggttcgaaatgagcgaggaggggtggaaggagggcaggatgaataggaaatggctaagcgacgttctcgatggattggtacgcgaatcgaatgtcagtgctgcacctcctcgtacccgttcttcgcacgaaattgacactgaaaaaatcatcgtttcaactcgattgaattcgactcgactctgtaggaccccgcatcgaccgtcccggctgataccccgctcgacatgcgttaccacctcgcccgcgagcaaaagaaacgacgtaccaggcagacccagggggcgcacaatatcgagaggaagcgagggatggaggctagggggaccggaggtggtgtgaggggcttcccgggagagtggctgtaggtatgactggcgggaaggatttcatcatcaatttactttctcgaatggacatgcttgggacacagtcgaacgggttacaagttgaggcagggatcaacggtcaccggctgcgagagggtgaagtctgtctgagagacatccgatgcaggaggttggatcgactcttctgaggattcggctttcccgccggcctgcgagtcggcttcattcccatctacagtgtgttcaggtgtttccccgtgaggttttccagtaggacccgttggctcagattggggtttcgctcgactagctggctgctttggcgtttcgtccattttgcctcggcttcgatcggatgtaactgaaatctctagcactaagccaggcagatagtcggatttatacaaggtcgcctacaatatatagagtatgggttgagagcgacctgacaccgtgttttgaggaagctaggtggcgaaccaataggcttctctaatctcctttgtccatgataagcgaacgcggcactgcagggcattggccggaatggttcggcaatgcagatccggtagccaattgataatgtgacgcatgcatcgcggatcgtgaccatcccactctcgaacaaatctcaggaagggaagttgtgttcccgctcacgccactagtatgtcctgccagactgagctgaaagacgatctccgatggtcttcacttccgaaagctaggacaacgcgagggaattatccgtaaaacaattcggaacgcaggcaaatgacatcagccgcatatataattgattgatttccaggtaacgatgtcacgtgcaatgatgaaagaggtacatcgcactattccgagtgttagcttgcgatttcgcctttccgcaacgagtatcaatcgctcgggtattactcagcgaatccagcgttacatgtatgcacctagcaagttactttacgtgcaaccgatacctagtccgccctcgccaaagctgcctctacgtccctggctaccgccagactgctcgtcaatccgggcgaattgaacccgcacaatgcgaccaatccaggtctcgccgggtcaaagttgatgtgaaagtccgtgaaaccgcttccagctggtgagaggtttggacgaatgcccgcgtaatcgggttggaggtggtcaggatcgatatttggaagctgcgtcacaaggtcgtgtatcagtaacgcgtggaatttcgagattcgacatcatcacgcacataatcgcgaatggcatcggccatctcgtccttgcgctcagctgacggctgcaaatgtctcgtccaccactcctcgtcgtcctcttcgaccgcaccaggcttgtccaccgagctcactcgagtgatatgctcgacgtcgggtccaaatttgacgttgcccgccatatccaaggtctaggaatgtaaatcagccagtagtattccgcttcctcttcaaggctactcacgagatgtgtgcctagtccttcaagacctggctcggggcaaggatagagaaggcgagacaccgacccgacgccaggacccttgtaactcaagtatgagcctgaaggggcgaaagtcagtcgatcgtcatcattgcgatacgtgcgggaccaaccttttgtgtaatgaggtgtcaaccgttcatgagccgggagtaatgggttcaaaaggtcgacgcaagtgagtccggcggaaagaaccaagttgcgggtcaaaacggcgtccggttgtgatgaaccgccagtcactgtctgtacgatccatccgtcctcatctgtacgtgcggaaattagcgggcatccagacaacgatcgacaaaaggcgtctcacgacgatcgatcctgaccaccttggtccccagtgcgacactcccaatcccatccccccgcgcctcctggatctcggcatggagggaatccatcactgcatgactatcgacgattccgctctccgtgctcaacatcgagcagagcacgttctccccaaggtcgggttccatccggcgagactcgtcgggcgataaaaagtaggtgggtaccccttcgccagagggagaatacgaagggtcgtttagcacgggatcttgcagatccgaatgtaatcgatcgaggtacatgatttgccgtttggtcgtagccacaatgagctgcgagaggaaagctgtttagggcggtcgacgggggacgatcaaagggttgagaacggactcgccttctgtgtctttctgtgaggaattccgagacgttcgcatcgctcatacatcagttctcgacctcttatgcagtaacgcatcttgagcgagtccaaggggtagtagatgccagcatggatgacctctgaattccgtgagctggagggacagcgtcaggcgtggtccaaacctcgatttcccgcggttctcaccttgtttcctgcccaatctgcaagtaattctcgaattagaagtgtctataacatactaaatgctttactgacctttccatgtctctctaccaccaatgtggtctcatccggcctcatctccctaaacctggccccgacggcaaggccgatcacgccggctccaataacgacattgtcgacgcgttgatctggggcgcggagagcatatcgttgaagctgtttcagagctgatctagttgcgtgcatgatacttttaggcgggtaaacggtccgctctgatttctagtaccgatagaacaggggttgatgacaccgttgcccatctttgacgttatgagtgataggatcggcgatcgtcactgagagatgttatcaaataaatgttcgtaggctcagccgccaccgaggtgtactcgagtatatcctgatgtcatgacgtgtaaattcagaaacgatcaaataggctcgtcaacaagttcatgcgagctatcacccggtcgccgatggtcactctatatcgctatcctccttgtacgagtaatctcgaaaccgtgtcgtcccaggccaatttcattctcaggcaaacgtctttgagtttgatcacgagactctcgattcaagcacaaactctacttcaaaatgccacgagctgaagcgggatcggcgaaagccatcgggaatgcgatcaaagccaagggtgagctcgagtattagcatcaaagttggaatagccggcctgacacatgtggtgaccatcttcaggtctcggccggctcaagtggtactgtcaggtctgtcaaaaacaatgccgagatgagaacggtttcaagatgcactcgcaatccgagtcgtgagtcaccacaggcgtgtacaaatctcgcccggttctagctgacttttgctcttggatcatccaggcatttacgtcagatgctggtagtcggcgaacaggctcataaacatatcgacgactttagcaaggctttcatggacgagttcttgactctgctgtccagaaggtgagtcgtcagagacctgtcccgataggtcggagctggagctgaactttgccacacaacagacacaacacccagcgagtccgagccaacgccgtgtacaacgaatacatccaggacaaacaccacatccatatgaactcgacgaaatgggtcactctctccgaattcatcaagcacctcggtcgggaaggtctggtccgggtagacgagaacgaaaagggattctgggtctcgtgggtcgatacctctccaaaagcactggccaggcaggccgagatgcagaaacgggaacgagcggacatggacgatgaacagagacagaggagacagttgagagagcagatggagagggcaaaagcccagcaggaggcactgggaggaggtctccaggtcgaacggggactgcagcgcgatgagggacagaagatcaccttaagcttggggggtatcaaaccaaagacggaagagccggtcgaagccggacctagtgatgcagcgaaggagacggcctcgacgggcgcgacaacaacatcaatagcatcacctaccgtgggagtgacatcggccaagccgctttcgaacccactcaaacgacccgccacgacaaacgttttcaagacgtcctccaaatccaccaagacgtcttccacctcgacacccacgtcacatctcgccggcaagaaattcttgacggcagcagagagactgatgctagaggatcaggagagggcggggcggaagcccacgagcgggggttatcagggtatgggaccgagccgacgatgaactcggctgcttctccgctgtacattacattccttctccgcctcactgtagcataacaataacgtttttgggattttattctccttaccatgaacaagcgtatgctgatattcggtattacatgggacatgatcagtctattgacgcagttgaagaagcttgcaacgatgtggaattctgaaacttgctgtgtacgacttggttcatgaagaattaatatgggttcaaaaaccgctggagaccattgagatcgaacaaggcatccaggatcctgctgttgtctcccacgccggggatatcaatcagttcttcgactattgcaccaccgatcgcgttcatggagatgctctccctgagtgtaaatcccatatgtatctcctcgataactgtggaggggtggaccgtgcgaaagagcgccaagtggtgacatcccggacatcccgatacaacatatttcgttgataattcgtagcgctcgcaaagcgaagcacatgtggtcgttacggcgacgggctttctacccttgccttctcatgatacgagccaagctccgtgcggacccttatcgttcacagtcgtatgaaccctcaagttcattgctgccgcacatagctgggtgtcccgaccctagatccaggtcgatatccaggggtcgtaggggtcctcgaccgaggcgttccaggtgttccgggtgtacgaggggatcctacggcaatatcgtagttggatcccattgaatgctccagctggcccggtgctgtagctcgattacgggcgtggtactcgttgcgagcctagaaaacaaagtcgcgctggtcagcaagggtgaatttatctaagctctcatgaaacgctcaccttttggttttcttttcgtcgacgactccggttcggatcgttgcccgctggacccccttttgcacgcctgggattcttctgtccattcgtgtactatcgcaagagttgccaacttcagctcgagcgagaacgtcctgaacaacgctgatgactcaccacatccttgacaccccgggctttcccctccttgagtgtgacgaccccgatgtcggtcatggatttgggatccaggatcgggtcaaagcggaaaccaggacccttcatgtcctgcctgacgaaaccaggcggatcggggatggatggaggtggaaccaaggcgccgtggatcaaaggcaagagttgcttggtgtccttggcgagtggtcgtgggtctaaagatggaaacgatgtatcagaatctggccgtcctacctgtcgttgtcgtcgagttgtggcgtacctggcaggccacctaacaagctgtcatagtggagaggtggtttcttccactctcgtttcgtgcccttcagctttccatcttccggctttatagctgttgaagatccaggattgccatccgacggactatctttctctccaagtgtacttgtgtccacgacatcggggttgccaacatgttcaatgaacagtggtcgaaggtgaatggcggtgaacaggtcatcggtcaggccgaacggtgccggtggaatgattggaaacgtctgtggaacgacgacgggagctgcgacaggctttctcgtatgaccgggtgactccatgatggaccaagcgggaacgatatgcccctagatcttatttgtgagctgtatcggagatggtcaggcagatatgatgatagagggaagggaaaggggggatcggccgcgacaattgaccgaaaccggtcgacgagtctcgggtccgtgagggatcgtcgctgcgggtataggtccatccgactttcggcaattcacacgacctcgcccgttcgctagccatcatacacacaacatgcatcataggtaatcgagtcggatcatacatgacgaggcgcaactctaagctttgcgtccggcctttttcgtctcgggcagaggcctgggcttgttcttcagcttgggcgccttggcgggctcagccgccaccttgtcccccttgtctcccttgccgttcgagagcttgactcccttgctcttcagcgctcgtcgtttcgagtctatagagatgagctggatcagctaaagatcgcgatacgacgcgacaggtagatcactcacccttgatgatggcctcgtcctcgtcgtcgttgaacgtggcgttggccagcacgtcctcctcttcgccgagcgtcacgtccatagcgtcatcctcatcctgaccctgctcggccctgacggcctcggtctttttcgtcttcttcatgaccttgaacttggccacgaagaaaccgtccactgcaagttgtattgggtagtttagcaaaacgaaacgatcgcgagctgaaaaggtgtgagcaaggactgactgttgtgcttgtggggataaaactatgaaacgacgatgaatactcgtcaacaacccccgtatcaaacgtcgctagctagcctacatcgactcaccctcctggtcatggatacgctcgggtggaactgcttcccaccaaacgccttgaatccgtgaacaccaaactgcagccccgtctcgacgagcttgatgttgggtcgtttccggagcgcgtaatctaccacgctctcgttctcgtcgaccgtcaccgaacaggtcgaatagacgacgtacccacccgtcttggaggacgggtcacacgagtcgagggcgcacaagagaagttgtttctgcaggtgagcaaggagctggaaatctcgctcagactaaaagttgtggtgttttgtgagccagagtcattcgcagcctatcgagtacgacctgatgggacccaccttgttgaccttgacgctggggtccttggagatgacacccgttccactgcaaggcgcgtccaacaataccctatcgaacccgcccatcaccttggggaactctctcccgtcataactacacacgacgacgtttttgcaaccgagtcgatgcacgttggccgtcaagctcttcgtcctcgccttgttcgaatcgttggcaaagacgaccccggtgttttgcaagagggccgagatgtaggtcgccttgccgcccggagccgaggccatgtccagcacgcgttcctcgggttgaggggcgagggcgatgacgggcaaaaaggaggaagccgcttggagcatgtaatgaccggccaagtattcgggcgtcgcaccgataggtacgctcgactcgaagacttggagaccgaccttgctccatttaccgatgggttcgaggttgaccccacggttgatcaacgcctgggccaagtctcgtcgacgcgtgcgcagggtgttggttcggatcgttaccggacgaggagtctcgttggcttcaaaaaatgccaaggcctggtagacgacgacgacgatgacgacacgaaatgagcatcatggtgcgactgacggctgcggatacgtagaaacgactcacctcggcagcagagaacaagaccatgagcttgcctacgagataattgttgtatccaaagtaggtagcgatatcgtgctgcagctgcaacaagtgatccgatcgggaactatgatcatcggcccacggcatcatcgccagttagcgccttcagaaatgccaagccgaggggcgaaactctggctctcgagaccgggctcgagaccgggaaacgtcgtaaactcacaatcccttgatccccctaaactcgccgccggggatgacgtcgccgtcctcgtccttttctttccccccgaggatcccgaccaaccacctcatcctcgcctcgacgtccctcaagctggtcctcccctcgagctcgtcaaactgctcgtcatcgtcgtcctcctcggcgtcctcggccgtctttgcccgggactttgtgacggcggggagggaaaactcgctggcggtgatatcacccatgaggttggtggtgatctgtccgtcaatgtcctcgtccgagtcgagctcgagcgccgggttcggtcgaagatgaggtgggagctcgtcctccatatccacgtcgacatcggcgtcggcgtcgtcgtcgttgccctctgcagcctcgtcctcgctcgtgtcgaaagcgctatcatgttccaagccaccgacgagatcctcctcatcctcatccccactgacgtcgaattcatccccctccatcattccaccctcgccatcgtcgtcgccttcgccgtcgacttcgctgtcgctatcggcttcacccatgaacgccgcgagatccatctcttccccagaaggagcttcgtccaggtcgaaatcgtgctgaacttcgggcgcgtccgggtcgtcattgtgcataaactagatcgaggcgcgcaagcgggggggggggcgggttgagatgagggatgagggagggggaaatggcgggtagtagatacatgtccagaagagaggtgccatggcgggcaggtaatgagaggtagcgaacaagaatatcaacatcgagctggagctacctcgagagcacgacaccgagtaccgaccttccatcaaactaggttctccttctaatcctcccgttccaaaggcatgccaccacctcccttcccccgtcaatccgccagccggccaacctccagcgttcatcctcccgagtccaccatcgacagaagcgtcttgcccgactcccattccgtagccggctccgccgccgtaccccgtcgacccggggtaggaggaagagggaccagctcctggtgctgcctggccgtagaattggagggacggatgtgaagggtcgtagggcgacattggagccgcctgttggttgaagaatgccatattactggtcggcgtggctaatctgcttgtgggccggtgtgaagacgttgatcatcgagttgtacgtctgacaccaagacgttgaagtaagactaagatcgaccttgacttgaatcaatgggatgaggtggaacttgattgatggttgatcggtcagcttacctaagcaattacgagatcatcaggatccgcctccgcccacagaccaaagcttccgccatcattacgtcaccatcacgtcgttgcggaagcaaataacgcgtcaacctccattcaatcgtcatctttcgatctcgtcgcgacgttgcgaggattcgatcaatcgatgatggtcaactcgggaatagcttagccttgatgcgacctgatgaagcgatatcgaggcagatggcaacttgacgctcgaatctatatggcagcaagactattccgtacatttcgattcactctcaacatgtcgtcatccccgaaaacctcacccgtctcccttaaaagaccagctcctacaacccgggactcatcctcgtcctccatccaggccatctccccgcaaaagcctacacccaagaaagacgctgaaccaccggcgaaaaaggcaaagatcgcgatcgtctccggaggagcaggaagtggaggacagaccaagttggcctttggcaaggctcctccagggagtggaggacagactaaattggctttcggcaagacgagctcggggtccggagccgggtcaggttccggtactgagaggaagacggggtcggggagcgtgataagcagctccgcttccacgggaggtaagatcgtcttctctttgacggacctggagacgagctcatcccactgatgaggataccgtcgaatcgcagcgacgacctctatccccttctccgctccatccccactccgcgcccacctagctcttcctatcccctccctctccccgaaccacaccccggccgagttatcggaacatatcgctcacctccgacgtatcaaggaggagtttatcggtctgctcacccccgatcaaaaggagcttttgggaatggagatcgagtcgatgggagatgattggttcgtcggattgaggggggagatggtcaaacagtatttcctcgatgtaagtcgtctcccctcaaagcaacttttgagtatcgcttcgttgcccaactaggcgagagtcacggcgtacagtatgtgcagaaaacaagcgaaaactgatcagctggtcacgacatagctcaaacggttcgtcattcaagaacaaaacaaatccaaagtcttccccccaggcaagtcacccttcatcttcactatcccaggagacgtaaagctcggtccccctctcggctagtcctccgtcttttccgaaacataccgagcaacacgtcgagaacgatcgggaagctgactcgtggacttttaatggcaatttagcgggagatgtctattcttggacccgcttttgtcctttggcggggatcagggtggtcatcatcggtcagtcccgtctgtgtcgatgtcccttgatcgggtctcgtagacgatcagaggacaaagtagagcacaagctgacgggacacgcatcgtaccccatcttttgcatatatgcgcttgagagaacaggtcaagatccgtatcatgtgagcatcgatcggatgagaagttctgagcagaaacacagctgatggatctcttcatcacctcgacacagaatgacggccaggcgcacgcaagtattcctcgctcccttttaaccatcgagattgacgagcttatatgagcgctggtcgacactatccgcaggggttggcattttcggtcaggaagggcgtcacggtaccgccttcactacggaacatgtacaaagagctggagaatgagtacccagaattcaaggcacctaaacacgggtgggttgactgttgaaaccagagttccccgtgcagggtcgagagaagaaggctgacactcccggctcgctttcatcctcccagcgatctctccagctgggcccgtcagggtgtcctcttgctcaataccgcgttgaccgtccgagcgcacgaagccaactctcactcgaaacatggctgggagacgttcaccgagcgagtactcaaactggtcgtcgaccgcctaagcgaaaagggaggcgaggtcggggcaaagggggtctgttttctggcttggggcgcgggggcagggaaattggtcaaggggatctcagaggtgtgtcgtgtcggcttgaggacggtcgtgcagtcactatcgaggcaatccagactgacgtttcgtgtcacaattcagcggcaacatcacattctcacgtctgcccatccttctccactgtcagcctcgcgtgggttcatgggcaatgaccatttcaaaaagtgtaacgagtggttggagggcaagtatggcgaaggcaagggtatcgattggacgagcgtgggcaaggaggagtagatcgtctagcttctagagaggcacgtagacacgtggtggagtatcgcacgacattcacgcgattatcgattatcggagcattcatcgatcgtcccgtcgtggttgtcatggtcatgatcagcgcgagctggaacgtgcttgcgtccttgagacttgtaagctggtgaaacgtgctggtgaatagctctttgccaagtctagacgccaagagtttcgactataatcgttttacgcccggccctggttcttctttactctctcgccttgtcactccccatctgctgcggacaaacgtttgtcggatcttgctcgtgcgaccaaaaagaggaaaaagtcccgcgcagtcaatcacccgtcggaagtaaattcgcgcccccgcggatatatttccctggacaccgcaagtcgcctcgtagtccgcgacgatgtagtgtgggccttcaatcttcctggggaacaacttgcggtctttcaccagcttagcgtcgtaaagtagcaagcacgttcctcggagtgggtcgagatgtgagcagttggaatcacatggtcagttggcgctcttttccctcagactgcgagtcgagacgcagcatagtctcactgtacgcgtatatagatcaattccctgtcgcagcgatccgcagcatacttgtaaccgagatccatctcaaccaagcccgaaaaatcacatctagtcatcttgccctagcacctcgccgcagccaaggaagaaaatatcatccaaaggtcccatccacctcttggcccgaggcgtggaacagaaccttgatcttgccccatctttgaagggtttcaaccaaattctactcgctcgtgtgaaacttccgacgtctcatcttgctcgaaatgggttttactctcttcgatgcgttcacgcgtcaacaaaagcggtccgtcccgtacacttccaaagtcgtaatgtgaatgctcgtgctgactcgtcggatcggaaacttttctagtgatatcgccatttatgcgttggggatcatgctgtaaatacatcacctacgttcacgcagactgaaactctgctgaacccacccgcctttctcctcaggtacaaattcggtttggaatactttaatggagccttcatcaccctcgccaacgaacgattccccaaggaggagaggtaccaaaagatcggtatcttgaccggtaccaacgccgccatgcaatgtgtaagcgcagcgccagactacaaatcactactcgacccagctcacctgctgtgcgtcccacaggttggttcgatcctcatcgcccctctcatcaagcgattccctacgcgcaccgtcctctcctacgcagtccttaccttcggtctcatcagtatgaccctgttgatctgcgacgccgccactggtggaaagcccaagatcctcaacggcggcaagcaaaagtacggaacctggaacccgaacggattgttccccatctacatcatcagcggtgtcgcctacggtatggtcgagttgattcgacgagtcatcccgaggaacattgtcgccggtgacgtccagcgtgtgagcgttcctttaggtacgacatccattgtcccgggagctgactcaactacgcctccgctcgacagctccgaaggatggatgccatcgttcacgtcttgtatgaaatcgccggtaccaccggagccttcacctctcccgccctcatcgccaagtttggatacaactactcttccttcctctctcccatcctcttcgcctctgccgccgttgtctggcgtttcgttagcaacaccgaagcagccgaaagggcggaagtcgagacttcgcgcttggaacagatggagcacgaggatcaagtcaagagcaccaactacctgaactcgatctgggttgggttcaggagctttggaaaggctacttactttggaggaaagctcgtcttgacccgtcgacgatacgcctggttggtcatcggttacaggtcagcctcggagcgagttatgtagcgccatcagagcatccgggctgatagaaatcggactgcagtgccgccttgtacggtcaccgataccttgagaatggtcttgctcccatctttgccaaacagtgagtacttttcgcggctctgtccatccctcgtattggtatctatagataccaactcgcttaattcatagggttctcggtacctcggcttggtcgcagatcatcgtcggaggaagtaactttggtgaactcctaggagcgctcagcgtgttgctcttgaccaattatgttcccacgcccattcccttcctccgactggacgccctcgcgctcaacttggtctgggtcttgccctttatcgccgctacgaagggtgatgtcaccggtgcttggaaggtcgccgcctgtttcatccccatctctttcggttgggccgccggtgacgtcagtctggccgcctacatccagtcgaccttggccaagctcgagaacatcgaccccgatgtcagcgctttgggtgccgtcatggctttcgtaagtcgctcactacacagtccgcctctctgtgtaccctttcactgaactgcaatacgcatcccgctttctagctttacgtcacctacatcgtgctgtacgctgtgctcagtgccgttttgggtaaatgggtcgacaagcaaattaccgggggcgtctccgctcgtgaggtcctgaagtacgtcggaggaacccagttcagcatcctctgtgtgctcgtgctcctcgcttcgtgcatcccgagaggcgccatctctttcaacccccagcttatcgagggacacacctcgaacgaagaggagctcgatgtacccgagtcggacgattacaacttgtccaaggaccgaaaggacgccggaatcgacggcaaggagaactttgtcaacggcgcccaggttcctgccgtcagcaagtatgacaagtagaaggtgtcgcgttcgatagtggttccccgttgtttcgcttggtacgcatgatatgagttgctcttatgcactcgcgttgtaaattatcatacccagcttgtggagaaaagcccgccgagcttgcgagacatagatgttgaaaccgatccgacccctgctacgctcgagcagtcggaccagccacgatggacggcaaacccgtatacacccgaagcagtgtgacgagcagatggatacccaatgactcgaacatgctgacccctttcgggctttttgtacaccggcgactgggattgtgcccaacgaggatgaaccgaccatcccttctacttccggcaattcgcctgcccggctaacagccgccctgatcagctgggcccagctcggttatcatcaaaacacgcgcgcgctattctcgctcgcagttcccggaggagttttcgatcccggacgtcagtgttggttgcgtgcgacgactcagctctgctacggccctcaccctaagccccacatgctcgtcagcgggaatttacaagtcagcccctttcgatcaacatggcgagagccctcggtcgcgggtactattctgggcgctctcgctgacaatgaccctcgtggtctgggatcagacggcaattcccgaacgactgacggggtcgatcgattcgacatttcggttatttgcatcgtcgcgaaacaaaggctaaccggaccatcatatttaaaccacagaacgggcatctaccccgtccccgctaaaacgggcccccacggtggtctacatccccgtccccgtctctcagccacttccacccaagcgaaccgaaccttgcccagaaatgtcaaatatgatgtctgctgatcctcacgcctacctcaagtggccccgtctgatcatgttcaacctcaacggagcgttgagtatcgccgccaccggtgtctctgcgcgatgtacgcccgattcatcttcgtcacttggatatcgcacccgcttaccgactttttttgcatgtgtctcagcctttgtcgtacttaatcacgaccgggccactttggtgagtttgcatatggtttgttcacatcaaaccaggcggaaaggaactgaatacattgtcttctcggcagaaatctcaaattcctggtgggaaactggagaccaccgatgtcgtcgccgttaccgcaatcatgtgtaccgccgcgggtctcgcatcaatttacactgtcagccatcgagtcgcgccgagtttaccgcctattgacctgcagctgagtagacccttgttggaatcattaggccgttctttctaccattatcacgctcaagatgcaaaaggtcgagacgctcaagacgatccgtgtcaaatacgccatcatgggtttcttgctcttgttcctcctcggatccgctatcgcgtgagtaccggctatcttgtgcgtggaatttgccggagactgacaagaacgcactcctccgtcgcaacagcgccaccgtgatcatcgtcccccgaagcgcaggcgtctcggctcctggcattcctgccgcattcattaaagccgccattgccgcgcagggcaaatcattagcttacaaggattctctagccttccctactcgtaagtcgacctggcgcccggggcccgagctggcttccaacgagacacctggactgacctcgaaacgctcgatattctcagtgattctcgtatggatctgtttcggaacgaccaccatctgcttcatccttgccatccttgctgctatgcacatccgcaagtacggaccggagaacacgaccgttggacatgccgtctcgaaagcgcagcactccgacgaagggcttgttcacgctgataagcccgccatgagccacgtcgaacgggcttaaattgccgagttccgtgtagcatatcggtcgacccggagtaaatgtcaaggacgatctcgagcatgtccgtagcgtttgtatcgaaacccatttcttaagaagggagcaacgaactctatctgtccgatgtaaaggaattgtacgtaggcaaattaacgagatggcaatgtcatgcaagtccgagaactccacattcatgtgagatgagcacgatacaatccgtgcttctcaggcgttcacctcctggtgcacggaacaagctggcgcttcttcgtacgaggttcttgcagaagcgcctttgctctgccgagtatgtccgtgcgaaaatcgatgtgactccgcctcaatcacaatctggatggaaggatcttcaatttccgtggacttgcatgcattgacccctcgatcgagtttgtgccgtagacaaaaaagagtaggcctattcgacgtgagatgaattgccctgacgtagctgatctatgttgccgtcccgcccctggcggatcatcgaagagtttccgttcgagaccacaatgtagcccccgccaaagcgcgtcaaaacggtccatattgtcggcagatcgaatgcatgacgtgttcccaagacattcggcgatagcagacgcgctgcaagtcgatattctgcgcaaatgacccaaagtgtcttgctgctgatactttcaagcaaaggctccttggatcgacagatcacgtgatctccgtgacccctatcacggaatgaaacgggccgagccgagaccccctttcgatcgcgcttcgatcaacgatgtcccaagacgaaacacctgaaatcctcttcctcgctacgcccgtggccccgaatgatcctcgcttttcctcgaagtttctacgcgaatctctcacggtacccggctgagacgatggagcctcgcaggaccgtagccaggatcaatgccgaagagccatgagatgatccgcgagaaacgacgaaacgccacaacggacgatcacatgtgttctccccctttgacccctttaacgggatgaaaagcctgtaatcctgatcaaagcctaaactgtgatgatcgacttggcctccacctccgtgtatcttccgaggcccatatcatcatggatcatggatcgtcttttgccctttccgcctgcaagccaaaagtcgtcgatcatactatgcaatcgaaacacggagatatcccgttcgctgtctgtgggcaggattcggacgggactcaacttcctttccccatcacacgttgccaaaagtcattaacttcaatcgcgagtgggagctttgctccactcatctggaaatgggtatataggtccagaggatcggatcgatctggcgcttgccaaacgcatgtatcgatgatcgttgctttactcgcaaaccgtgcttttagggtcagattaaattcagaacttaattcaatatctcaccggatatcgagccatatccaatccacacccgaattcgtagcatgtctttcggtaagggtaccccgcctatggcgattctagaacccatcatcaaagcccagattgagaaggctcccttcttcaacctcggaggcttcatcgtcgggttcgggattgataccaccctgctcggaatgatgctagtcatgctcgtcgattggtggaagtatgctcctaaggagagttggaccatcaggatagtcctggtaggtctcgagaatggtgattcaaaccaaatctcgacttgtcggttctgatgcgtcctctttcagttttattcggtttttgcggctgtcgtcgccacggcctacaatgtgcacatcatgctgtaccactttatgcagaactttggcaaatatgcaccgttcctcctcgggcagcgtacgtaccgattcgatcatcaatcctcacatctactaatccgtctcgtattcgtacgacagggaccggaggctgggccatcatcggaagcgtcagcgttccccagatccaagccttttacgcggcgagggctttccggttgaacaacaacaactggtttatgctagtcgctatctcgctaggcattctgtgtcaattcggagcgagcgttgcatgcgcggcactccactactcgactccggctattgaaagaaaagacgtgagcgcgttcagtcgaccgggactgcacgctagatactgaaatagtcccctctgatcaggtcgtcagcaagcccatctacgtttgggtctcttcaactttgtttaccgatggactgatcacggcatgcatcattcacggtctcaagaagaacaagacggcgtacagcgagactacgcgcttgatcaacaagctcgtgacgtgagtcgtccttctgccctctttgcaacggttttgtaacggtatattctgacgtcgtctctatgctgttccaagtatcaccgccgaggcgtcccttccggccactgtcgtctcgatcggattcctcgtcacgttctgtcgatccgggaacaccgacatgttcatcctcttttgggaaatgtttcaccccaagatgtacattttgcccctcatcgccgtgctgaactctcggacaaagctacagcaaacaggcagtgcctttacccatggatcctcgaccggtcaacattccgtgagttcctagcggaactcacgacggagccagttcgatctcctactaacctgcttcttttgtcatctgccagcaacagacttttgtgcttgattcgttgcacagcggaccttcgagcgccaagctggacggcatccatatcgataccactacggagaggcaggttcgtagctttatcttctggtcatccaatacatcaatcattgctcattcggaccgatgacatctccacaggaacatccggtcgctccatacagcctgggcctcaaccgtcagcgcaaggatgacgaatcgagcattggtgccctgaccgatgaaagacatggaggaagcatgccgagcgatagcaccacggcgttggccactccttttgccactttccgatcaggtgctgctcgataagcatcgatctcgcagccggtaggatcagagctacgatacacgaaacatggcagcagttaaaacaacaggctttcttcgatggcaagataaacgcaacaccttgcaggagttaccaagtctatgggcggtctttcatgtatttgtagatcggaatgctatacggtaaacggtgtacgcttgtagcgaaggaataggcttgacgatgaacaaggattttcggttggtctaacacccgacacaccgatgcgtcagcgcctctataccacaatggatcaacatcgcaagcgagtcccgaggccgatcgacctatgaaaagtcacaggccaacgacgatgtcgtttacgaagtctacgtttcgatatgagctcatagcttcggctaagcctcaacaacggggtacaaccccaacatattctcgagcctttccaaccccgcctccaggttctgactggggaccgaaaacgttactcggaaccagcctggtacattatggtggtacgccgatccgggggcctgacagaacaaagttacgcccgactcagcgtccgctcggcttgaggtggcgctgggaactcacaatgtaaagtccgccatcgagcaatttctggaatacctcgagttcttgttccttggtctcgatccccactcgaggcccgaggtggacccaaacgaaatgtcccgcgttgcacggcttgacatataccccccgacgctcgaaccacgtcctgaccttggcctgcgcctcgcccagcctggatcggttcaaagcgaggaaagtcccgaggtagtcggattgcagcaacgaggaaaagatgacgtcggccggcgacgagatcttgatctgaatggacatttgagccaaagtccggaggagtcgcggattgtgttgcgtgacgagcgctccgattctggaatcaagccgaaagatttcagcgacgtggcaaatatgggcaggagagagatgagaacggggtctcacctgaagccgttggcgcaaaagtccttggacatgccgtacacgacgtgcaaacgacccttgtcgaacggtaccccaacatcccgatccaggtcgatactcagcgccgagttgaaaggtcgcgcttccgggaagcctgtacgtcatcgcgagggttctcgatgtcagtactttatcagctggagatgtaaagacaacgagcgcactcactcttgttctcgtatatactcatggcgtagatttcatcgctgacgaggtgcaagtcgtgcttttgtgcgaaccggcagtagccagccagcgtcgagcgggacacggtcgtcccgagcgggttgtgcgggttgcatacgagcatcgcccggacctgtacagtatcacggcggtcgtcagtaacgcgaggcatggcagaagtccggtaagatacgggttactcacatctacgccttgctcggtcgccctctgtagcgccttttcgaacgcttcacctatcccaccttcaccatcccattcgtcctcgccggcttccgtgaccttggcgtcccaatccacaccgaccaatttgacaccggaacgacctccgacgagatcccgatcgaacccggcataataggggttgaggatgaggacgccatccccggcgtcgacgagcgtgtggaacaggtggtccaggatggccgagacgccgacacctagagagtccgatcgaaagaaacatcagggatcgatttgatgatcaaagagaagaaccgagcgatgctcacccgtaatgatatgattcgcgttcacctcggtcgcggggtcaaagtacctgatcgaccatgtccatcgatcagtcgcctcgtcctgtaccgtctcatcaacccgtcctactcactcattcaggaacccggcgagagcgttatgtaacctgttggatccccataggttgtccccgtacgtcaaatccatgctagtcaggttatcggcgatcgctcggcgggaaaaggcgaggatctcttcggcctgcatcgttcatggttgccggttggcacacacggatgaagcgcacatcggagagaacgagatcgtaggtcgtcgatggataaatcgtacaggaatcgataaacaggtagatagtagccaatagtcagtagtcagtcaaatgcggatcgcccgatcgaatggaaggggacccacgcataagaggttctcggcgatccccaaggagacgatcccacccgggttcttgtccttacagtagatattgttgaacagacatgagaagctacgccgtcgcgttcgtattcaaagtaccggttgaggtcgatcgattggtttcagtttccgtgagtgagtgagtagataggggtgatgatcgggatggggttttcatgaggtgtcgacgtggtgtgacgaggtatggaagacgagacaagcgaacatcacgtgcgtagccagaaagatgatatccaaagagaaaggtctcgtcagtactcggccgtggtgatcttcaaagctttccatcggtgactgaccgttcgatcaacggacccggttcaggacccgtcgtcacccgcctggacattctcggtccagtcccctttcccctctttgaggacgattcgccaacaacagaagaggaagagaacggaacagcttgttgttgcttctgctcgtcctgggtgattggcaggtagccgtggcaggcgacacttgcgtccaggcatgatgtgcgtgatggggcgatggtaccgggcatgatcgtgatacgaatcgagtggatggacgtggtacttggtttcaaattatggtcgatttgtgaggcggaaacgtgctcgcgggtgttacgactgtgtcaatctcctgtgtatgtatatatatatacacgcaagctgcaagctgcacgctgccactcttgtccccatgactcgatgaatcgccctcgattcccaatattcattcggatgatcacttgtgcacttgaggttagtttccaagaatttacatccgtcactcgaaagattcggaacagatttgattccgggggctcttttttgattccgaattgattccgaatcgaccgtttaatccggaataggggaaatttggggacaagtcgccgacttttatagcatatagcatggccatgtcatgccgattcattcgaggcggtcaagtcgtatggatcctgggggcttctggacgggatctcggattgtcacgtcttgtgtagtaactcccggatggtgtgacggcgttccttgactgtgctgtatagggtcgtcgctgtggaacgggcggttcggatctgcttcgatggactcgtagagccgcgagttgacaacctcgaaccggatttcggtcataaagagtacgagatcaggattacccgacatcaacgaaatatgtagatacctgaccggctggcaaaatagcatatgatataccactgaatctagacattcagccgctttctcataatttcctctacatcacatcccactcactatggctcaaacatagattgattccacgggaccccaggtttctccgaatcttgactcagaaaccagtcgaatctcagtgccccgcgagatcgaagatcaggatcggtcgtgacgacgaaaatctcactggaaaacctgcactagagtctatacgggctcttgagcagcaacagatcgtccactatgcgacccaccctctctctcttgaagaagagcggatcctcgaatcgttggctagcgaggcagcaatccgacccgttcgtcaactcgcggtccaacacaggtcattatcgttcccgagcctcgtacaagctgttacaactggccgaacgtcatcctcagatcttgccatcgggggggacggttgtcgacctgggatgcgctccggggggctgggcacaggtcgctgcggacaaggtcggcaagcggggtcgagtcgtcggggtcgacctcttgcccgtcagggatctaggcgaggggtacgaccaagtgtcgttcatccagggagattttctttccccagatatccatcaaaagctcgtcaactctttacccaggcgatctatcggctcggacgtccaggtcgacgcggtcttgtcggacatgatggcgaatatgacgggcgtgaggatccgtgatgtggagaacagtttggaactctgtcgttcagcattgacgttcgccgtgcaatacttgagaagaccggcggtcggagaaaagtcagttcgaacacccccccccctctcatcgtattgcaggtgagcagctatcgaggctgaccatcacactcgtcccggggcaggcttacaccggaacgacccatcgccctacctcctcgcaaaggcggcagcctcgtgtcagtccaaccatatcccccacacgctgaaccgaactgacctgggatctcatcgaaccccgatatccctccctcccaccaacaggttgaaacatttcgcccaccccgactttaacctcttcaagaagatcgagctcgaacccatctttgaccgggtgcactatgttaaaccagagagttctcgctcggagagctccgaggggttctttgtctgtctcgggtatcggcccagacgatgacgtgtggcgaggtgattcgagtcgtcctgcgacacggagcagtctttttgaggaggctcctctgaccggcttgcctagctctcgattgcgaggacacgccgggctgcctggtcgctgtcaggaccaagctggactggatccccgagattccactaccaaaatgtgaaacgggccgtggtcatcacgctaccagctaggccatatcggccgaacgagcgggtcatcgggcacaacgagactgacgacttgacgatcagccgtgtctctagacggacagagatcaggccgagctcaagctggacgaacacctccatgtacatcgtaggcttcgatattgacggccacaccgctttggctgcaccgaacggcttcgctgcatgaatccgccttgtggccgatctcgaccacactactatgtatgggcaaactagatgtacgctctagatacaaagattcctccttgctcttgttccgaggcacaacttccctctccccccctcattcccttggtcggtcagccttgccccacctcatcatcccgggaaacggtctcccttcctccccgaaatactcgtacccctctttcaagtagacgggttgcccggccttgctcgcgtccaggtaaatggggatggagggcgaggtcgaatcgacgaggtgggagacgtggcgcaagagggatgttccgacgcctcggccttgagcagaggatttgacgcagagcggggcgagtagcctagatgggagaggaaagggatcgaggtcagcaggagcgtgagcggctcgttatccaaagatcgcgctacgacttgccagtggtctcgatcgcctaggattttccacctgtattcgtcccatcccttccacaaaccttttgatcgagagccgacaacgatcagacccgtccaccctctgtctacggcaacctcgacacggcgacccactgttgaaatgcttcctgtccaccccttcccaagcttctctatcctcgtccgtcttcagagcctcgtcctcggtgatccaagggtgaggcgacctgcaagcctctggtcggacatacccggcccacccgaggatctccttggtcccctcgtcctctgctacgaggagcaagaatccagggtcccggaggacgaccttttgacgatgaaccgatcgacgcagtcgggtgcgttcgtccgggcgttgcgtaaggggttcggtctcctgaaagggaaagatcgagtcgaacgccgaccagaagatgtggatctgtccagacgatccacgatccgaccgggtgttcatcgtcagcagaatatttgccatccgagtaaggagatgaagctaaagactgacagtggcttccatgtcggcttccgtggcttcacggacgatgaccttcaactttggtttacccggcgttctttcccgttcgacggcttgtgctgggggttgttcagaggtagcgctcatcgtgtgggatggattgtcaatcgtatcggggtgttgaggtacggaaattcaggctacagaacaggtcagaaggtcgcttgtcgttccgagcattggcattatattatggagaggagtcgaaacaaacgaggtcgacatggatggttgactcgaactggtcagcgaggtcacttcatttgattccgaaatctgagttttcggaagcaaatccgccgaaaatagctttcgaggccatgcaggtcagtcggactcgtcagtagctctagtacttatatatcaatatcttacttgagcatatttcacctatgtaaacggccagaaggtcaatgtgaggtggctgttcggggctcatcgagttcatttgaagagaaatccgtccttccggagagcatcgtttcaagtctcttggtcatcgtcacggatccacgacgagacagcgcgcatggctagaccaacatgcatcgctcaacatgtgaagagaatctctccagccgcgccaggtagctggtgaattcattgcagaatgaggaacagcctgagcgtttagactggaagatgtatataatgatatgcggttgctgaatagactgtcacgtgacctcttgtatattccgctttcggctccggtgctcaccggcgatcaccggtcaacaaagctgtgaaagccgggccaaactcgggcaaacagtttgggaattgtcgttgtacatgctctttcagagtgactgaccgcgcaaccttagaagccatcagctaggtcgactcgatcaaagccctacagagtgttctcattcccggacgtcccatcaaagagccggggtcaacgtgctaccactcctcgccatcggagctcacaacgatgatgccgtttacatccacccacatcaccccagctcagacgcagacgctcgatttctcggacggtgcggatgatcaggaagatcgaccaggaccgagtacgacgaggaaaagaaagagggcgcattataggcaagtcctcggacgtcgatgtgggatggattaggggtatcgaagctgagaggattttgagttatgtctggcggtagttgtgtggaatgctcaaagaggaaagccaaggtcagtaaatatcgttccatccacacgcatcgtgccaaggtatatggatctaacgcgatacctcccgatacaacagtgcgacaggtcgttgccgtgtgcgggatgcgtagctagacggataccgggcttgtgtaaatacctcgtcgccgggtaagccacgcaacactactcccgacttagcgatctaacacgcgcgaatccttactccggggggtttagctacgaagatccgctcaaacagacggacgagatcaagtcgaggttggaccgtaacctggacatctcgatggacgtgcaaaatcggctagtcaggctggagcagttgttattgtcccagcagtcacaccgacgaccacctcaacaaccccaggatcgacttcagacggatgatcggtacgatcggaactcgaatctcggatctttctcgacgaacgaggggacgagatcgaggagacgttcggcggaacaagagggcggggtgggaagggccacggggttgaagggacggatcaccgaggggagttatttcgggatttctgccatggccacggtcgagcagcccggtttgcttgatcatggggatcacgttagttcttgtcccgtctgaactagactcgagcagccagattggctgatgtttagcccttgtttggcgctcccggggcgctggtagagctcgacggtcgggtgctcgtatatggcagaagcgtggacagccagactgaacgaattaccagagagaatggacatggatatcttgatcaagcactactttgtcgccatcaagtgagtcagtcgtcttgggtggtggcggtcgtggacaagctgatcgaccacgaatcccgccgcgctttgcagcctcacccgatgccctgtccgtgagattccgttcatggaacagtataccaacctcttgacgggatctcctcaagccacaccgacgcacatggtgtttctcccctttctcttcatcgtcctcgccatctcccgcctcaactgctcggacccacggctggacctcgaacaacctcgactccgccccgaaaacctgtacgccgcttcgagacgcgccaccgccatggtcgatgcgacgaggaaaccaccagtctcgctctacagcgtcatgaccgatttccttgtggctcggtacttgatcctcgtcagacgcgcgtcggacgcctatgtgctcatggggtcggccatcgcccgggcgcagtcgcagggtctccatagggatagtcgggcgttggatcatgtcgtcgatccgatgcacgaggaagatcggaggcgggtatggcaatgtgagtctaggtcaggtgcttttcgggctccgacgacgacgttgcgctgattcacgacgtatgcggcgggggtagacgtctaccacctcgatcgatacctcggattgctcatcgggcgaccttatcagatacaagacgaagactgcgacgttcaacccccctcgaccgatgtcatgcgcgggcacgtctcgtggggattcacgtgttcgatcgaaaacgtcgaatccacgctccgattcatcctcctccgaacgtcaatggccaagatcatggcccggttgtcaaaagaggcgttcggactccgatcggcttcgttcgaaaagacgctcgaactcgatcgatccctcgtccagtgggccgaggagcttcccatggatttccaaatcttgtccagacagcgcgatcgatctgcgagacaggggttcgacgaacacgccgatttgcattcgacgcatcggttcttgctgtctgcagagtacaacttttcgagaatcaccctgcatcgccccttcttgctcctgagcgtcaaacaaccgggcgaggcggggacgacgtcgacttacaaggagagcctcgaagcgtgttaccagagcgcgatggacgacttgtgggcgagggcgatgtacgcacagagaggcatggctaaactcagtgggggcacgtataggatcaccacgtgcgccatcatcttggggatcatcatgctcatcgacccgtcgagggaacgattacgaacgatcagggattgtctggcggcctttgtcgcggccaggagggaagacgatacgttggacgaggaagggatccaagggttcgccttgttggaattgatccaggcgagggccgagtctggggcgatgcatacgccaagcgtcatcagtacagccgcggggtcgacttcggggtcgacacatcgttcggccgagagtcggttcgacggcatgacgatgccgactagcatgcatccgggtacggttggaccgggagtaggagctgctatgcatccgaacacgggcactgtagacgcatcgaatggcaagtatctacgctcgaatttccctggacctggacctctagctcatcacgattcgacctcgcccgcagcgctatggactatcccggcgctcgacgtccagccgaacgtgcagaccgtcccgtggactgagaatttctcttcgtccgatttcgaactgtttgaagcgctcatggcgcatttcaacagcacgtagcatcattattgtagaggatgtttaatcttgttggtgtcggttgtctcaaagtggtaacctcgccaccactactactgatccatccatacggtgacacgcgatgatgacgcttcgatgaatatgctcacgcggaagcaaattggagggggcaacgttcattctcgtttcgtcatcgaacatgctcagactcgatgatcatatacgacgacctctcgattcaactgactatcgaagcacagaatcttagctggcagatcaggtcgaatccattgcatcgaactcaagcaacagaacgagcccgcgactcgcaaccatgtccaaccaacctccctcgtacgacacggccatgcatcagaccgcacccacggatcacgcacacgagacccgtgcccaacaactgtctcatgctggcaacttgaccgattactccagttccgacgattccgacgccgatggttcgaggatcccaggaactcgtactcgacgtgctaaacccacgcaagaagagatcgatgagaggatgagcatcgacgatgaggaacgagagttgccagagggatggacccgttgtttcgacaagtcggtaagtggcccggcactttgtcgtcgtcgtcgcaataatgcttcagagaccgcatttcatagcgactgatgacttttaccgaaacgaccccatagtccggccacgcgttctacgttgacacccgtgcgaacccgccccgatccatctggcaacacccgtatgacgaccccgatttcctccgttccctcccggacacccatccggccaaccccaactcgaacgaagccaagcaggtccgatcccagtatgatcagatgatggaaaaggctcgcaagcagagagaggccaaggcggaggctaagaggagcacgggaggcaagttgaaggacaagttgttggggagcaccaagcaggagagggaagccaggaggacggaaaaggccgcgaggagggccaggcaagaggaggaagagagggtgagtttggcgcattacggggttgactccagtcacgtcgtggatccagggactgaccgatcggaacgtctggtacaacgtcgacatggcatctcaatagaaagctcgtcagaaatacctcgaacgccgagccgccttgatgaaacaacaaggactcggaggagactgtcagtcccggttcagggttcaggtcgagagatcgtccagtgcatagctgactgactgtctctacctttgttccctctgttttacggcggtcccgcgtcacgctccacagcttacctctatgctcgaaagtacgtcgtcccgttctcgacacgtctcaagcacccagcctctcgtttagttcagtcatgctaaccgcgattctctcgacgtttcgctagcccctacgcctactcggccccggcttacccttatagcaggtacggaggcgggatgtacggcggcggtgggatgtacggaggagggatgtatcctcgttacggttacggaggaggctacggaatgggacgtatgggaggaggtatgggaatgtgagtcgtcgagcacagccggcgtctcttggcgagtcgagggctgacccgaatgggatcacctagggggttgcctttgctcggaggaatgttgctcggtggcgctctcttctagtcgcccccagctcatcaatcgatgggactcggacggtcaagcgggggacccggggaaagatccccgcaagcaccgcaagcaccaatccaattttgttttcgaattcgcaatgtgtctcgtctgaacgccgtagtgtagccccgtagtatgctttgatttgaacaggtattgctttctgggctttcctttacaacccaaattgagtttccatgcagttcttggtcagacccacacctatatcccatgcatccgtcttttgcggaaagaggaaagaaggtggctcattttttttgcccagaagcgaggcaagatgcgcggtccgacagacgacatctgttccttctggccggatatccagagtataggacattgaacgccgggcccgaggtaccaggcttctccggtaatagctcgtttgtatttcagtggtctgtggcacagatcctgcctgcacattctcatttctctcagatcatggagtagacgccggatgtcattcctctacatacgatattgaagaaacaacgatgaaattatcgaccagcccgttggaccttgttggaaagtcttgtcatggtaatgaagaataactttgtgattattattattgaattaatattggttgacccgatatcgccatcgcgattagcgctaggctggccgggcgggcggcggacttgccggggcaatatggtctgatcaaggtcgggctcgttggtacactcttctgtcttgctggatctagtgcttccacggcccagcccgttcgatgtaaggagatgggttctgcaggatccttgtcattatgactgctcgtccgcttgtgacctggaacatgtcgcattttattgtccgggcgtcaacttgcaacttggcgcttgttgatgatcaggtaaggacatctaactcgttcgagataaacggttcgaatcgtgtcgaggaagcgacaattgggttcttcgagaagctgagcaggtgtacaaggcgcttcggtagactgtaaagaggtgccgatggtgctcctgtggttataaatgaatgaatggaagtcgacctattctcgaccatgagtttccgttgaatcgttgtcagctgactcgcggggaccccgagttgccgggtcaggtcaggtcaagggcgaacggactagctactatacatctacttgcatctatagacactgctactgtccttatctcgtaccagtcgtcctggtctgttctgaacacaagctgcaaagaatgtcctcggttgaccccatcacgatcaggccccagtcgggtccatcatcagcacccccaccactccaggcaacctcgtcctcctcctccaacctgtccccaacctcgccctcgccgacctcttcaaagctcgacctccggaaccaagcggccagccccaccacctcgaccagtaacatcggatcgtggttatccaccgcctcgctcggtccgccttccccaggtagcatgtcgggtggaatcaagagcccaagcttgttcccggggatgacgctcagtctaccagttcgtacgggggggaacaataatgctgcggtcacctcgatccaaaccacgacgaagacgacaacgacgctcccgtggaccaaggaggagttgatactcaaatctcctaccctggaggctacgagtgccctatcccaatcgttcggtacgatgggaatatcaatagggtcgagctcaccgaggagaactcgacaaggtcaagaggaggacgccctcgtcatcgaaggcgaggacgaagtggacccgaacgacgagggcgtccaggtcggaccgaattcgagagcgttctcacctgtacccccatcatctcaaggtctggcacggggacaagctcggccctcgggcgtacagatggcattcgatgcagagagacagggggagcaggagcgagaggtgcaagacgacctcccagctcaaagccgtccaacccggaggttctccttcaacaacactaatgctgacaacactggccgaccgaacgacctggacctcggtatgggtctttcggccccgatcactatccccgctcctgatggtcaggcccggacgaccaccatgggcacagtctcaccggagtccaacctgcatgcacacaaggggagcgtgtcggcttacctctttggcggatctccgaccccgtccggaccagtggggtcaccgggaacgggctcctcggctataggtctcgctatcaataacgacgggaacggtgggcatggtctaacaaacacgaacacgaccacgacgacgtcgacgacgacattctcgagtctggggccttcgggacccatctctccgcccatcatctcggcgagcgcgaacgcggcgtgggggaagagtgcaagctcgctctcggccgctgggttgggcgaggtccccggaggacaaggaggtgtggtggatgggaagcttgagagagggcatggggtcttgaggaggttgagtttgggagggtccgctcgggtgagtccttgtcggccgtctctcgttcgataaaaccccaaagtgtgcttatcacccgggtcgctcttatgatatcgtcgtagccaacggtcaagcggacgaccccgccggctacgcaagaatttgtcaacccgttcgatcgtcaagcgggggcgacaacgaagcctccagagatcaggatcgagagaccgacggaccccggtcaacccgtccccggccccgtgcccatcacatcgtcggatcaatcccgatcccttccttcttccacgatgaacgtcttcccccgtcccactgacacgaccaagagctcctcctcggcggcggcgtacaataaccctttttcaggcttttctcactcgtttgatgatcacgagcatcacgacgaggaacacgcctatgaacgcgcgttcggccgcgtcggagggagtctgttgggtaggaccaagagtatcgggtcagccagttcgaccggcgcggtggtcggtgaacagggcaggagagcgtcagtccagtcgggcgaggtcgaatcgcccgcctccggagggatgagaccgagaagggtctctttcggttggaccgggttttcgaaacccgccccggccgcgccggccactggacccgcacaggatagagcaggacagacgggacctagaccggatgggttgcctgcggcttccgagtcgggcgggctcaaggtcgggagagggaggagcggaagtggaagtgctgggactggaggtgggggcaagaagaggagtgtcagtccggtaagtcataggcgacggtatagagcatcgttacgtggctcacccacgacgcgtttgcccggacagatgagcgaacacttgttgagagggagcggtcacttctaagtccgatcttcaggattgatcacctagtcgcgatgctctcagcaggaaacgactcgagacaccccgatgtcttgcctttcgacgatttcaaacaacgacattgttcacaacacccattcacacgcctatcccggttcatagagactcgttccatgtcgcgagcaccgacaggcggatatccaacgaaaccactacgaaaccctcatgatcagaacttgtaccggactgcctaccgaataaaccgaaaaaaaggggaaccaatagctgtacaatacgtcatgtcacgataagtctgccataccttccaagtcagccacggtcgataatgtattcctgctgtgtccggccacggctcgaccgattcgtgttggccccgactttctagcttcactcttgtttcaatccttttcatgctatcgggagatactacaaagccactcctccgtggtgagcgaaatgaatcgccgtgaacgagtagcctgcataagcggttgttcaggcttttgggatgaagccactacatcctggtcttggtggttatcagcagcgcgaccctacttgccatgttgtgcgatcctatttgagatcggtccaagtcgacgatcagctggcgattcaatatagcaccgtggtcttcgctactgcactcacaaatcggaaaagagcttccacaggaccgagaatagaatcccttggagtccgttggcgacgtagcgggtaatcaaacctcggccgaagaggcctctccatccttcttcctgaatgacttgcttcgcggcatccactgcaacgataggccatagtcgtcaagcggaggctaccgagcgggcaacgcgatctcaagcttaccatatccaacattggtctcgtgcacttgtcggtacgtcttgatcacgcgcaaactgttactgatcgtgtccgacacgatagaagcggcaaagccaatcgaagcttggcgctgttggtgcagaaaaaaaggtcagccacgtttcatcgttttacttcatgcgatattgaccagaagcctctggaaaaggttgtgagcctcgggtagatgggcttggagaaagttgtatgtctgcaagcgaagttttgattatcaacgagggagtgcagcacgcctgggtctcgcggtgaagactcactccgaaccaaggatctgtgaggcatcgcaaggcaggtcagtatggaccaacactaccacgacgacatggggaacttacagtgccccacaaacgtcgctccagcagtcgcgacggcgccccaccagagacagccgatcccgtgatcctgaacccttttacgcagaagcttcaaaccctcgacaccgccccgagtttgttgtgtagtcttgagcgtgtctatcggggtcaaggtcatccggaataaagccgacgacaaggatgccgcgatcgtcttgaccagtacgggccaggtcaaggtcgacaagagcgcaaagataccagcattggcagcggtatcgccgaatcgagaaatcggagcctggagcctggagagcgagagcacaaaggacgctcagcgaggtcgaccgaaaatgacacgagcccgagacttacaaagcggcccagagaccggcgtagaatctcctgatcccgccctcgtgccagagcttgccaagcgttcccgtaaacgtcccaccgtagcgatactgataattcatcgtggtcctgatccacatcaaggttaagacctgcaagaccatcgcggcggcaccggcaagacctcctccgagcgccgacttgagggctcccttgacgtcaaagttgttctcgaacgagatgccgttgccgggcgtgagaatgctgtaagccaaggcgatcgacgagacaaagtagagcagatagacggagaggtgaatcgatgcgaggtgcggggtgatcaagcgagggagtcgcggtgggctaatcacagtgctcgcgagcacgtacgcctgggcgaggggtatcataatcagctgctactcgaatgaagcggacatgatcgccatactcacaaagactggatcgtggatgaaggccttgacgggcagatgtttcctcattccgtgcacgatggcgatcgagatcgcaggcaaggcaaagtatctccatgcgcaaaccaataagacggaacccaaagtaggagggagcgccttcttgtccctgttgacgagccattgacgatcagccggtcgaaccctacaagattgacacgacaagactcgcctcttgctcaactcggcctgcttgagactggctccgatggccagggtgtccaagatgatataggtcatcccgatccacccgatactgcctccgatgactttccatacccagcccgaaggctcagcgaggttacgcttcagaggcgggacgaaggcgataaacagagcgacgagccctggaagaaaggtattgtggaacccgggtagacgagcggtcaaagcggatgcgcgcccggtcaaaccagtcggattctcgaggagtggggtagtctcgacatcgtctcgtccaggacgagcagggttggacgatcgagcgttggtctcactcccgtaactgtatgcggatcgcacgtccacgtcgtcctcctcgtcagaggcgatcgaaccgtcttcgccgtcgacaggaaggacgatcgcaggccagactacagtcatcctgtccacaatcggccttaggatcgccctgccccgtccagtgccccgcttagtatgtcatcgggggtctgtgtgggcaagatgatctgctcacctagccagatcgaccgtccaccaggtcaagatgatgtacaccaatcctctttgaacctgatcagcctgggtatccaagatcctccatttaagatgaggcagcggtccgttgcccccgcttgccaaccgggagtaggcgaggaataggaagaggggtaccgaagatacgctatacgaagcagaccgacccccggtcaaaatcttcccccgcaaaatacttcgggaagacgaagtgaacggacttgttgtagctcagactcgctacgagccaggaaggagctttgaagaatctgttgattcccaaggcaaagacgatcgagatcccgtgcgtgacgaccgccagagtagggatcggccagactatcggcgcgtcgtatgggttggtctatgatcagcgtgtctgtctgtttctactttgggtagtcataggccataggaaaggtccggacgtacatttccaaaaagtcttgaaggcgattatatcggcaggggcgagcgtgtagatcacgagacacggtgcaaggagggtctttgcgagccaaggcaaggtcttccacgagggacatttgggttcgagcgtggtcagcttcgtccgtcgacgacgagggcgaccgaccgcacaaagctgacatgttgcgtaccttggcggcatcccggtctgtcctacccgtaatgaaatatccgagcccgatggtcagggtcacaaagacggtagcctggaatgtatacgtcaacaggtcgatgaaggattcgaccggcatggtgatccgtgcgtggtccgttcgatccgggttcgatccggttgttcgctgagtgtacagggtatcgattaaaatcggggtatggctcgatgctaggtatcggattggggtggactgcaagtggttcaagatctatcggggagtccattttcaagctgagtacgatcgtatggtcctcatatcctgttggacgggcttattcatcgacttctcggtcaaatccgatcgacgtcattttacaactatcaatcgaaaatctcacaaaccatacgatcgctctgtctccgaggcccgctctgtatgcttgcgaagctcaggctctctcatatgggataaagtatagcctcaggttgtgatgattgctagaacaggtcatgtccaaacgaattcgcatctcgttgtactcggcaatgatatcgccaagctagcgaatttggtaaagggcacaaccttgcagatgattgtaggcatttgaaaatccactgacaagttgaaagttgaaaatttggcttctcagggacgattgggatgaggatgccgtacctcaccggcttttggtcgacaatatcgtctcccttctcctgctgattatgattgttgaccttctccgcagcaagcgatgagctgagggaaagccattgcggaccagaggtagaaatgacggtccgtgtaacgcctcgtcacgcaggtcgattggacgtcgagcaacaacgcggtgatcatgggcggatggttgcgaatgtgtacaattgataatgaacatacacaaatgttgccaaagagcagctgtgtttcaccctacctgaacaccctcgtgtgactgggcctggccaccatctcgagaacgaggaccccggtcattcccttccggcaagccatcctcttttccgtcttcctcctgcaggcgaccgtgcagtaactcgattggacagatcatgaccttatcgaacgtcttggcagcaattcggcattcgtatatgaagcatctatatgatctgattcagtaataatgatatggttggcccccaaagaccctcttgacgagatccggccgaatctagcaccccgaatttgagcaaaggatagagttgaagtgaacctagagtcagattgaacctcgtcatccccatgaccgagttgactgaaacaacacgtcatttgctctatatctcaggggcgggagccgtttcggggtggggggggggcgttacctgatcaacccatacggccaaggacggcgtgaggaccccaagtcgaatcagacctgtcagcacctcggttcaaatccacgtcctcgtcactgatttcagcaacactgaacgtcacgttgtcacctcggtcaagagagaaagggatggtcagacagatgagagagatggtcgcgtttcgtccgaaaacctctcgaggtgcgcggcttttgatccgcgagatgatcgtttcgctcgcctgaaacggggtccaaggtcacgagtcgggacggaaacgacttgttcaaaggggataaatgcgttttccccaaggggtggtaaaggagcacttatgcaggcccagccgattgacttcctttgcgtacaaaccggaggtcgaccctttgcgtcgactatggacctggacgagtataagaacccacggctgagggaattccgctttagactcggtcgtcttgattgccctctttgcttctccagcgatcctcgcccatctttctagttttgacaagtactcgacttgcatttatagagctgtgctcatctacctcgttccactcaccgactcgtacccattcgctagaataagctctttgtcacaaacatgactcggttctatctcggtcctgtgctcgccctgatggcgctcccgtccgctctaggacacatggccgtctggggtgattatgtctacgaacaaggtaccggagacgacatcttcaaccctctcaattccgagcgcagctttgacgaatgggtgagaagtcaccgtatcagattgggcacttccattgcgtttattaatggaacaaaatgatctttccccgcagtggttccatggcaaggccagtgatagcccgtccggtatcttgtctcttcgagctggagggaccgccaccctggacatcgcctgccgcaaggaacacagcgcgctcggcaacccgaccgatgacgcctgtcctcaagatcccggcgcctaccatgccggagcatccacctgtcctgaaggcaatacttcgtgccagaacggatggtccaacagtaaagaggaaaacttgatgggttgcgccatcgccatcgcctacaaacccacggccgcacagactcaacccgaggactttaccgtcatctccgtccaacccgaatgcgtacgtcaacggttgacctcgttcgagatcccggccaacttgcccgcctgtcccgaagggggttgtacttgcgcttggttctggtcgggttacaactcggccgacgagatgtacatgaccggattccgatgcgacgtcgagggtggagtcatcgtcgacacgagctcgttgcccaccgccgcggaacctcacaaagacacggacaagagtagcgggccgatgcaaccgatctactgggccgtcacgctcaacaacatcgggttccaccctgccggcctcgaccagaaacccaggtacgacgagctctacgggtggacggccggcgctcaggacgcagcgtttgcgagcgtggccgggtcaaaccccggtgcccagtccatcgccaattcgaccaacaacgtcgtcgaccctgcagaccccgcggcggctgcagctgtgcccatcgaatccggttcggctcctgacgcatcgatcaccgttgaagggcaacccgactctagcgagaccggtgccgctcccggtcgtgaaggtcccgctgagaccgaagcggcgggtgctccgaccgatgcagcccccgctgctgctcctacgggcctcgacgatgacggcgccgcgatcggtggacagcctcctgccggtaccgtctctttcggagaatacgacaccgctacggatgccgtcgcgcttccttctgcgactggtggtatcccagacggccccgtcgggagtgaggccggtgcgcctggacctgctccgacaggattcccaggcaatcccgccgacgccgacgccgaccccaacaccggcgccggcgctcctaccgacatggtcccccccgcagaaaatggaaacggtcgaccgactggttctgcaggttgtgccggcggtggtcgtggaggtggacaccgatggggcaactggggacccgaccaggctcaacaaaccggaggcgattatgtcggagccgagaagcgagcccggcatatggaacgtcgaagccgtcgtcgtcaagctcgtgtctaggcacggacgtcgttgatggtcgttggtgggtggtcgccggtcggatctcgtcgataagagagcggtcccaggtggattcgcccgatcatctgggtcgaccgtttggtcttttgtccacgccgatagcagtatctccaaacacgactcggttgtcgtgacatgtattttccaaactcatgccatcatatgtccatgtcgtacctacgtctcgcctcatctgatccgtccgagcctgccgtgagacgccaaggttgactaaaccgagtcgactgatatgacgctcatgttcttgtatcttgaaacttgtagaatctatgcgatagatctaatcgatatgcatgcaagcatgtgactgaccttgaatcgggttgatcccgtcgaccgatcgatcgatcgtagctaggtcgcgagcaatcacctgcccgcataagtgggcaaggtcaattcgatcaacccttgtccaggcaatatcacggtgatgctaggtcgtaccctgtgataacgagcgctcactctcgaagtagacatgtcgacggccatcatccaaggagctacgggcggttagtggttattgaccccccgacctcgacctcgaccttcttcgctcttctccgatcgcacccaattatctacattcgatatgctcacctccgtctctccgtctctctccatccacaggtctaggtctcccattgacccggctcttgttggcaaagaccaatctgaacattatcgccctcacctccaaatcatcgtcgaactcggcctttcccgaggacctgcgacaccctcggatcaagctcgtccatgatgttgacctcttgaaggaagatacggtgagacgagcggcacaggaggtggatggtcttctcaaagggaagaaggatgtgaggctagtcgtctgtctcgcaggacaggtgagttcggaccggaatattgaagagaggaagatggtccatagttgatactagtactactcccccgtgcccgtccatctcccctgctgtcctgtccatcctcatctcgacctgctgacccaccgagccgtagttacacccagagaaatcactcgcccagctagatccacacaaagcgctcgagaccctacacctcaactccctgggccacctcgtactctacaaacacctcgtccccctcatccccaccgcccgtcaattccagaaaatcgcagcgtcagggtgggaggaacaaggggatgatccggcaaagggatgggtgagatctgatggggccgtctgtctgagtacgagcgcgagggtgggcagtattggggataatcggaagggagggtggtatagctatcgagcgtgagtcatggacgtcgtgtcaggtcggctgggctcggcttcggctcgattcgattcgggcagggtcgtctgcaatgggatgatggctgagatgtgaggtgagatggtatgtggatgggaaaattcgatgacgacgatagatcaaaggcggcgttgaatcaaatgatccggactttggatcacgaggtgagtctcggggtgaccgggcggggaaacctcgtcgaggtccgttcgagcatgacgaaaggatggagctcatcccgggtttgattggggtgttcgtattggatcttgggtcgggaatagctcgtcatgaagaaatcatcggcgttggtgagtttttcaaccaagtccttgccggtcggatcacatggtaccagcacgatagagtccaaagagactgaaacgtttgaaatctcccttgatacacaggccatggcatatcgcaagtccccacgtcgattctttcggcatacctttaccatgcaccccactgatccccaagatttgacgctgacactccccaaccagatccggggacgtccttgacctcgtttactcgaccgatcatcggttccccttcacctgaccctgccaatggcctcttcaccccggaccaaggggcgctcaaattgttggagatgatccagagagccaagcgtggggataccaacgacgatgagcagctgggtggtgcagggtatgggggtgggttttatgattggaaaggagatcgagttgaatggtagtccatgtcgacctcgttgttcccggttcatcgttccaattttgccgagaattctcccgagttgtgccagctgacacaccgagctggagagctggaacgataccttgtatatatctatgcaactcatcccattcattgtaattgaactacaaccccccgcctcctagtcaacctgcaacctgacaacctcgttcgaccaaacacaaccaccaattaccatcatgtcgtcgccatctggaaaactcggtctcgccatcctcggcgccggaatctttgccttggaaggtaagcaatcgacatggtcgacttgtgacgtgttcggcgtcatgtcccaagctgcagcaaattgacatatgccaatcatctaccatcgctttcatcctcttctcgctctcgacccggcccggcccgtctcgtagcccatgtccctgcgatcaaggcctcgtccgacattctcgacttcaaggccgtctactcgcgttcctcgagaaccgccacgtcgttctcgctcgacaaggccgtcattgacgatttcaaactcgacgtctaccatggagacgacggtctcgacgagttgttggcgagggacgatattcacgccgtcatcatcgccttgcccatccccaaacaacccgaaatcgtcgaaaaggcgctcaaagccggtaaacacgtcttgagcgagaaacccatcggacccgacgtcgccagcgccaagaaactcgtagccacctacgaacaagactatgcgcccaagaaattgtcatggagggtcgccgagaatttcgcacacgaaaccggtgtcctccgagcggccgagttggtcggttcgggaaagacggccttggggcccgtcctctattacgacgtaaaggtcgtcaaccacgtcaagtcgggaagcaagtaccacgcgaccgaatggagggcagtgccccagtaccaaggagggttcttgatggacggcggtgtgcactcggtcgccgccctcagggtcgtcttgggggatgctaggtgaggagcccgccctcgtcgctcgacatgtttgccgcacgcgtactgaccggtttgttcccccaccccctacctttgacggcagacccacccacctcgtcggacaaggcaacttgcacaggacccacctcggacctcacgataccatctttgccatcacgtccaaacccgacgcgaccgtcccgccccacggtgacgaattccctcaaccggaaaccctcaccatggggaaatccaccccggccggaacgttcctcatgtccttttccgccccgaggaccccacagcctattccccagcaatacaccatcacctgcttgaacggggtcgtcaagttgaccatggcagggaaatggatcgtcgaggttcaatccgaagaccccgccgtcatcgagtacgcgggcaaggccgctcaggacggaggagagacgtacgagagcgtcggggtcaaggaagaggtcaaacagtttgccgaagatgtcttggggaaagctcccaagggcacagagaacaggggtgaacccagagacgcactctgggacgtggaattcgtccaggcggccctgaggagtgagggcaagtcgatcgtcttggccgatcagtagacgcgtccgaaggggacgacaaagtgtctcgagcgccgtcaggcggtagagtcggccgtcatgtatgagaagtcatgtgtaaacagctcaatgtgaaccgaatgtgcggcatggtgcgtggtgcaccggattcttattagaaggatcagatctgccatgtccagcacctggggaggtaccggccagtttgagtgatttgcagaagcaaacgacatcttgcggcctgttgatcgaggggacgacctcttcgggcaggtttacactggtgtctcttgagaagcttttcttcttatcatggagcgcctcctccaacatgcaacgcgggttgtagacagtggtgacgatctcgttgagatcccctgctcttccactggagcggtagtatgccgaatctggttgacgcacgttgtcgtcaaggaaacacaagaacaaaatcaggctgtcagcgggccaccgtacatattggcttggaagggaagcttctttgagaaaatatactgaacaaattaatatactgaacaaatttgatttggatgaacgtgtaccattgtgattgctgaggacagagctgtctatcccggaccccaaacgtagaacaccagataccgccataccatatcataccttgtcttcgttctggcctccatatgacggtcgcggtgaggttgaccggtccctaaacctctgggaagcgcattgtggctagtctcctcagaaccccttagcggggctttcgtttgagctccgcgtacgacccgccgcgtgtcgtgacagaagcccctgattgacacatgtgttcctttctctgcgcgccctagtccctgcaacattctgtcgatgaagttgtacacgtcagggagcttatccccgcaaacgagagaggccaatacgaaaccatcgccttgaggatcaggttgaggaggtttcaaggccgggtgtttgatgttcctctgaaagggtggtcgtcaaggagaggagagaatacaaagggctgtttcagctcgaccgaactaggcgtataaaagcttgtttgaaccaatttcccctccaatcaagtccgactttcaaatcttgccacttccaagaacgactagaacaccggacgagatgacgcgaattatcaatcgattcttactgctgacggtcatttactcgactgcgctgagcgtagttcacgcctactttcgagacggcgcagattggaatctattcgaggaatggctcatcgacgacaagacaaagaggaacaagaacgagcgcacgtttgatgattcggttgctgcccgaagcgagggtatctactggaacgtcaggaaagccaaggggttcgtcaaccaaccggcaccagtgcagccctggaaggacgataaaaacaaagaccgaaagcaatgcgggctggtcttttactatccggcgttttggatcaaaaagagggcgaatgaaggggctctgaccattaagtctggtgtcaacaaaatctcggatggagacacacaaaaaaccttcgagagaccactcgccatgtctccttggtgccaacccgagccgcaagggaagaactggccaggttggggaaacaaggataagaagatcgtctttcataattactacaagggcgccgagaccaccattcttgaccagtatctcattatagagtgcgtccaggctgacaccatggataccatctttcccactaaacaacactctacctacacacagagatggtcccatcgatcaagcccccgaagacaatatcgaaggcaaagtcgataccatgagattcgaagatttcaagtcacacaaaatgtggtacgggaacgcctcggccgtgagcgatacgcccgacagcttcaagtgggtgcaaccatcatacctcatctcgccattgtcagatgctgaaaaagcttcatttgtttcaacaagcacaagggccgacggagactacatttacaacctcctcaagtcatatgtagatgaacatcacgatgggacagttcctaatccgtggaagttcggtatcggtgagcatcgggcttgtagtctttgacccaaccgacgctcaaacgctgtcgcttttccaacgcgtgctcggacaagtgggcagcttggaccggtgtaggcgatttctggggctacactccgcttggtgaacgtatcggaccatctcccgatggttacatggtgtgcgacggtgacgatgacaagatcagcatttgctgagcaacaccgtaaatggtgtgggtccatcttcaggctggagaacccatcgatcgtgtatcatctgtgttgtagttgtaccatgcccacatttgtcaacctgacatcgatccgctgaggtggtgcaaggaggatgacgcgcaaccatcgcgactgtctcttataccggtgcctgaggctgggagtcgacggacactgcagagttctgacgcattgcgaggatccgttccgacgcgcagactgtggcagcaggctcctcgaaatgcgcctataaactgcatcgtcacagcaattgaaagtgctacttgtgatgacgaatgatggcggttctcccccatcgaaaagcgctctaggaggtttgctgatttcgcaggtcgcgcaccgatggcactgcgcatcgaaatcgccagtccccaggcccgtcgtgcgaacgggggatctttcagccaaacagggatgaaggcgttgtaccttttctctaactctctgacggatgctgtcaaatgcttgtcgactttgcattctccactcacgcgtgatgaccgaattcgcgatgagtcgtattgattggggggtccaccgtgggaaagagactcttcctgtgtggaatggaaaagatcagcattcggctcgatcggagcaatggctatcgtccaagcggacacttgccagaaatcgtcatctgctgctgggaaaaggacatccagaggtacagcgtcgtcttgatagccataattagcgaggactgcttcaagaagaggatcgcttccgacgtttccgacaggtgttgactggagattcgtccccatcggcagatgttgtgacgattgatcgttcaactgaacgttatggtgtgacgcaggaaccagttcagtccgtgcttccaatcgagccgtaggaccgtatcttgagctttgatggttggtcggattcgccacttcgttccgagctcgtagatgatgctggacaaattgttgagcagtcggcatgttcctttcatgtgtattccggataaaaggaacgacggatagcgaatgtgatatcgggggcgacgctgatctcgagttatcccgatcgttaggtacgtcgcgtaacaagtggtctagcagccggtacatgtacgccgccatgtcatcgacgctgttgcttgcatgatgtgcagcccatcggacctgcgtgagcgattcggttacgcggcgccgatccacttgatccatcgcggccatattcttcaccagccagatcgaggtgactgccagactgacccagaccaggttgaagcaataaggtaaatactgattgtcgacaaagaccgtttgaaatagtgaagcaagcccgagagcagcgtccacgcaatcattgtaggcgaatgaaagcggcgtagggacttttgtgtcgagagattctccgcccgactggtaccgagcgataaatagtagcctgtattcagcgatatggaatcgaaaatagctgtcgcagaggcggaaagtagagatttgttccggcagaaagacaagtctggctgtggacgttgagcggcgcatcagcaaggtatccaatatcgaaatctctgccaacccaccctgatcttcttcccagctcgctcgccatcgaagccattccaactcgagccattcgagctgcctgaggttggacgcatcgcctgtcattcctgccagcagatcggcatataaccggcacatccggctgaatttgatgaggggtccaagtgatgtctctcccgggcaaggtagatgggcgtgttccatcagccagtctgtaggatcattgatatcttccccggagatcatccggggggacgaatgatgtatcgccaggctgcgtggtagtcgatcgtcagtcagcatcgagctttttcattgattgatcgggtttggatcttactggtagtcggccactataatgcagagaggcagtaagtcaatatgagacgccgaggcaagttgcatgtatgaccctaccgattagatctgtcgagtgcaagccgcaaagcatcagcacgtcaactacacatgctaccggcaggacaaagactcactccaccaggtccgttctcggttctattcaaacaaagccaggtcagtgaccccggtcagatcccgcctcgaagtaacgcgcttgtcgactactcaccaatacttccctcgcttgccatggatcatcaggcagggatcccgtccttttcgaattcagcctcaactgttgcgccatccggatcgcacacccgattctgacccaactcgtcatatcatcagccttcttccagtgcgtgaggatgttcaacgcctggacgatctcgagcgagacgagcccgagttcacagatcttgccgtagatccggttggctagcaccaagcaggaagggtaggcagcggggcggaccgtcttggcggccacggtgaggatggcggtgaagaggaaaggggaacgatgccggcaaaaactggaggtgtggatggctggatcgagcacggcgaccgtgatgttgagtctttggaaatagctacacgaaaataccctgtcagctctcctcgcatgagacttcgtctgtccggaccggtcggcgccgagtcctcacaatcggactagatcctcaacgtcgctctccttcaagatccccgcccttacagggtcggtcccgtcggccgactgatgaaaccgttcgacgatcgaagccggggccagcgtctcggtcttgcgcgaaggaaggaaggctatccagggagcaagatcagcatcttgccggcgatcagtcgtatgagatcaagttgctcacgtgttgaatctccctcatccggtatgacatgggagaacgagatggcaaagctgttcgctcgactacccctcgattcctcttccagctcgacttggggatgcggtcctttacctctcgtcgacgatctcgtagtcgccgaagctggcgtgctaccgggattgacgctcggtcgacgtgacgacggggcagtgggagtgaacccgctttcaaatgcaggttgggcagtctgctgcgcatctgacgataggaaggccgagttccccggtgtcaacgcccgtgtcccgtcgaaagagggaatggctggtacacgcccggtcgagatggattcgagttcgtccgtcgctttatcctcgttcccggaaccatctgtaggtttcttcctcctcccgcgacggtgattcaagtattcacatacgaggttctgcttgatacaccgtttgcaggtcgagtggactcctatcgtgaagcatttccgctggatagagtcgtcttgtcagcgatgatgcagaagctgaaagatggtaaggatcggaattaccttgacgattcgacaggctagacaactgatcttgctcccctggttagcagagctgtaccggggcgattcagcttgattcctagtcaagggatagagcgggcgggtcgtcacttacggttcatcggaacccttgtcgctggctgctatcgtgctcatttcgtaaaatggccgggagaaagatctcgatcgtatgtctgcagcgtctgacgagtgttcaaagcgctctacatagccagtgctacgagtgtacgacaaggatgtataagatttgtgacgagagtactgtatacaaaggttctgtccaagtcgacctttgaccaaatacttccggcccgatgtgatctcttggattatctgattccgcggagcagaaactagtgcggcgacctcgattagaaagaaatggccgcaagcaatcaccaccgccaacgggaaaagaaccaggctgcgagttgttcggccgtggctgaaccgagtgtattgctgtgtatttgctgagtgggtgagtgagtgagtgaggatctttcacgcagtcgccggcaccgagctgcgagaattgttccatgtaaccgaccttccgtcgcatttcgcgtcacgtgatcggacccggacatcatggtatattcgtcagatgaggtggagtgacctttcaagatgcaagatgtcggcgagaacattcttgttacatcgtattatcacggggaaattacatgcatatctgaactgcttgaacaacatcatcgagcccatccgcgccgcccatcacggaccgaacgcttcctccttcttttgcctcttgacggatcactcggcgtgcctcgagaggtccttccacatggccttcttgtcctcgatcgcgcttccttgtcgctgaacaccgatcccataatcgtaaaccaactttccaccctgtttgacgaaaaaaaaacgggatgatcgaggtcagttcgaacgtaaacgatgagtagcgacgacgacatcacgcccccggaaagaaaggcgaaagtccaggtgcgaggtaactcgtgcgaggacgggacttaccagcgcagcggagaagatcaaggatccgaggacgagcccggatgcaagtccttgtctaggcgtggacatgtgtcccgggacgttcttcctggctctccagaggtagagcgagtaggcgcctagtatcacagagtgaacaggcgggtcgtcagcgatgacccgaccgagcatagggaaaagggggaaaacgactcacccgtcaaagcgttcaacactccatggatcgcagcgacgttgaatgtcctctgcgggtaagactggaggacgaccccgtcctcgaccctcttcgtcccgagatgcttgtagatctcgtaaaactcgtgaaacccggtgatcaacgccggggccataaagatcaacccggcagcgttcgagtagtaggccacctggacgagcacgggcgtagagggcaggagcgaggtgagcagtcgagggaggtacggtcgggagtggacggtcatgtcgatcccgtaagccgccatcaatgtcgtcaaggggtagtgcaccgtgatcggatggatggggtggccgcttccaaagacgttaccgaggcagatgtcgtctgcaaagaggtccgcattggggtcgtcagtcgctcgctctcgctatcgtgcaggacagggcgcgaagcactcacggtacaaagacatgatacccatgatgatagaagtggtgattgggcgaggtggtgttgcgagtctaggtagatatgagcgagctctagtcctctggcaagtcaagtcggttgtcgttcaaatcaaagagacgatatctcgttgagaagctgaagaaggtcgttgaggttcaagttgaaagttatgaatggtcgagctgcacgaagttggtctccactcgccctcatcggatcaagatcgacaattgcgctcgatctgactggttgcctggctgacgagctgacgaggatcgattggctattggacttgctgacatcatcatccacctccttcatccagcgccttccagctcaaaggttgattgccacttcgtcatgatccaccatgggaatcgagaaattagcgcccacgtggatgaaatcaaggttcgggttccagcgggacgggggtgagtcacgtgactgatctgttgtatctcgaaccacgatgggtgtatgctgtattattggccactgttgccgtcaggcgaagcgatattgaatcccaagccgtcgagaccgaacgatctctagcttattaatctcccaggattgatgacttcgagctagataacggaccgcacggaccgcgtaaatctgagacggcggcatcaaatattgagaatgatcacaagcataaaatgaaatcgtaagacgtatcacaatcaggtaacgaaggctctatatatggtcgggtcgatcggaaatcgtagggtcaaccgatgatcaagcgaggacgaccaggcatttttgctcaatcccggcggatcctcggaagccgaatccaagacagtgactgacggtacgaggtgggtcgttggcaggaacgtccagactaggcgtctcgccgacttcggaagtgccgatagaagaggtgccgactctctcgctggcgcggcggtcgttgacatcctccatgaaggtaggatcgaacacagcgttgtcgatcggcaagataatcgttacgttcttgccttctttaccgatcgaaaatcgaagctcgaccgccgcacgcacgatctctacgaacatcgcccagccctgccaagtgagcggtgtcgagattgagccgaacggcaacggtgatagctgctgggcgtgcaaaactcacttcatcagaaaaaaaaactcatgtcagggccgatgctgtactggagtcggtccagcgtgctattggtcatttcttccagactgaaggtctgctcaaggctggagtatgtcagggctttccatattgtccgacctgaatatcctcagccggcattgaattcagtctgtactgtccggtacctacaaacgatcacttaccgatgggcggtagagcgttatatacactcgataaatgacccgactggacatcatcaagactccctagcaatctctcgaaaatgccgcaccacagttcacgatatagccggctctgcatgtagatccgtttctctttgcgagtaccgtcaaggaggttcttgttggcttccacgcgaattacgtgattggcaagatccttgaccttttggttgagactgcggatgtcccggaagtattcttcctcagtcttggagctagccgggatgagagaagcttgagagctaatctcctgacgaagtcggctgacctcggtctcggcggaagtgagctgatgctgtaaatcggtgttgattgccagcgttcgatcgtaggctttgtaaagctcttcagcacgagtatcattgtctctggcttgatcagcgaatcgggccagtagcgctttgttgttgagctcgtgagactcgacgctctgcttcaaagtgacgatctcgtcccgaagacttcgcatcgtttcttgctcttgacgcaaactgtcttcgacttgtgcaacggagaacaggttggtctccgcggcaatctattcgatgaggcgcggctcaccatcaatggtgtcgggtatcaatacatcaggcggattctcggcctccaatccggtgccccaaacaacgtcgggctagctgattctcggagcagacttgatatcatctggcctggcgacatcagaactctctgtgatatacaggattgcccctgatgcagttgtggttgccttcctatatgaggggacttcagctgtacgatgttatgtcagaccgcatcagctttggattctccggtttcgatcacgacgactgactccttgaggggggctttctctgctgccgaaacgtcgtagtaattggcgatatacgttgaagcggtcccttgtgtgacgtgtctgcgttcgcgatcatacaagcattcaatcagctcgggaatcgcggcgacctaggattacacgcacccttatgattacgggggcccgttcccgtgagagatagcccgattgtagcctggaccatctcgataaagcccatctttcgttgtcaccagcgcgagcttcaagccagggtcactaagtttgcgtatctctagggcgactcgttggaactgccttgatcaaaggcacttccgtaacacaactggatgaaattctgttaagggttattttttcgccaattgaaatcgctgaagaaaggtggaaaaagggcactgcgggcatctgatgtatctgtaatcgtgcaggagctcagacaagtccagcttgatttgatgtctcggctgtcggctatttcttcttgcatgggatatcccagatgacatcgatccatcaatcatcagcgggccgtgaacgcggatgaaacctcatggacaccagcttctagcgcggtcgtcgcctgctaagcgaagacccacgatgtcccgtccgcgcgaggattccccttcgctggatccacctgggccgcaaggtcgcagtaattcagtaaagagcacatggtccgacgtggatcccgtgaagataacgacgcttctagcttctcgcctcgttgtctcgaagaagtaagaatgtttcggcgagaatacccgccgtgaccgatgagattgatgaaacttggtcgttccggtcgcggaccgcaagggacggcagtaaaatggcggatccagccaaatcttgatgatgatccctagattgaactgatgggccatcgagtgacctagacggcgattgatgcgaacggcagacctttaaagagtctcttggagaaaatgatggctgaggtctggcctatataagccgtgaccgggctcagcgcgatggtctctacgacctgttatgtggtaacacatcacttccaaatcaaagcaagctacgcgatcgagcaatatcgactacaaattggctacctcactatcagcttataaatcttacttttcgctgaaacatatcccagacgatacgacaatacgagtatgtcatcgcttcaagacctcctgagtcgcctatcctcaggcaataccagcgaattgcttgtgatcagcttcgatattgggaccacgcagtgtaggtcgacgtggcatcacttcgatagaaatagtgctgaaagactatggttttgtagccggtgccgctctggcttatctggtcccagaaaataaaggatcgtcagcaatctcattcatccgtatcacaagcatgaagcatatgcttgtgtgctgatccactatgatgttccaccaggcgagcgcccgcggtactcgaaaagcttccgggccagacccctggcaaggccaagatcccgtctgttttgttatacgacaaagagtgttttcgatacgcaacctgcaatgacctcatctcatgctttgtcctttctacacttcgcagtgtacgatgctatgacaagtggggaagtcaagtgaaccacctcagtcgacaagaaaaggcggcgctcaagagcggcgaactcgtcaaaagcgagtggttcaaacgtaagcccacgatcgtcactctaactgcggaagcgatgctgaagttgcacgccgtctgaaccactatagtatacatcgatccggaaggtcgtatcaacaagaaagccttcgtttctgacaagtccaaagaattaccccctagcaagaccggtttcgatgtgtggggcgattttctaggcaagctcagcgtagctgccaagcaagccgctcgcgaagaatgggcgatctcgtggattcttcagctcgagaagcagctaaaagtcaagtatattgtcacgattcctgtcgcctggcaaaaaggtgagtcggacgtcgaggtgatcttggttgggacagttcttcgctgacactcttcacaacgtatttcacctcctgtcgaccatcatcctacgtgaccaacacttccagatccctccaccatgatggctctacgtaaacaagcacttagaatcggattgatcaccgaagagaccgcttcctgcttgagattttgctcggagagtgaagcttcggccttgcattgcgtaagtcgttcgattgatggatggctccttgctcggatagcaaatattaaattattcttacagcatgaacaaacgagacatcttgatatgaaggtatgcgagattcctgcttggccaagactactgacgtgtaagagaagtgagaatgcttattacgcttttattcgatagcgcaacgacgtgttcctcgtcgtcgacgcagacggcggtacggtcgtaaatagcttactgtaaagtacactgcagctattctttcactttaccggacataagctaacaaaccatcacgctggatctaggactttacttcatgcaaagttgtgaaaaccgaaccgctcgaactcgaagaggttggcgcgaactcgaagatttgcctatcccacggttctacctacgttgaccagtctttccaggagatcattgccgcttatctcggcgcagcgtatcctctgacgaagccgaccgataggcatattgagaaagtcacgcacacctttgccaccttgcgcaagccagagttctccgtcaacaaaaaagctaccggatattgggatatcagcgacaacgaagatgatttcgatgatggcggaatcgaagtgccgtggtaagtctggaaacccgtcgggaggtgggttcacttgtgccaaatctgaacgacgttcaactttgtagggacttcatggaatctgctttcaggccgcatgtcgacctcatcatcgacaccgctgctgcgattgctaagggagaccgtccgagggcgagtaaaacaatttggttcatgcgcacctagctcagcttaacggcctgctttgtagttcatcttctgctctggaggattcggccacaacccttatcttcgcgagagactcgagtccatcgaaggtggggctcagatcgtcaagccggagcaaaccgcctcatcctcgtcagtcatcgtcgccccatcagtttcaaatggattcaggcttacattgttccgccttgcgacattcttattggctcgaaagcggtaaccttgggggcctgcctctatggcttaaggttttgggttcagaggcgtattagtgagtagcttagacttgcgttcctggacagcgagctagaagcaaaatgttttctcggtaatatagctcccagatgcatcggttgccgcacagggcccgtctgtcttcccggaaggctcctaaggcagacgaaatcactcgagtgatcaatcagtggggtgtcaaatatgttgacggtcggttgagtccgataactgaacgtgtaagccacctcactcctctccctcgtctgaagtcccactgaaaccgaagtcctggcagaacaagacggtgaatagcaaggattaccactccggatttttttttttttatttcgaataccccttcgaaggcactggcagacattgcgccgtcactctctcagcatcatcagccaaacacatacccaagtgagcggatgataaatgtaagcatcaacgtatagacgggtgcaagcgaacgcctatatattgagggtcttcctgcgtagccgtcaacgagattggctccttcaacttctttacccccaaggatgctccccacgagtacgaagtcacccccgatggtactcatattgtcaaacatttgtcacaggcgctgaaaccaggataaaagatcggcgaagaactgagcggacacgaccatattgcagattcgttcgagatcagagtctactgcggtgagaccgagctccgtgccgccgcctacagcgacgggaagggacgtgatggctgccgtccgtcgacgaattcgtcacctgatgatgtgggcgtcttttctctcagatgcttggaaagagtgctttcctcgaaggtcccgccgacctgctcgacgactaggcgctacatcgtttcttgaacgctcgcatcgcctcctaagcagcgacagtcgagagatacgatcgatgtcattttgaactctacgcatcactgaccactgatcgaccagcttcttgataattatgttttgcaaattacgatgtatcagctctacctatgcacctacgaatacgagaggtcaaacgcctactgcctgacgatgatgcgggctcggccatacttcggccggctcgtatgcttccgaaaaccggaaccatttgcttccgacgtcggctccgactggcaatctttttttggaagtcacctggccactcactcaatcaaggatcaagtacggatgtaggtaggccgtctgaacatcagcgtcccagtccgtaaaccgtccgatgactagacgacctgggacgagctatcgtatctgcttcctgcaccatagaccaccgtcgaacccgtgaccggacgaaaggattcaatgttgttgagctgcggatcagatagccatgacgtcgatgttccaggaatagcaaggtgcgttcgcagtatcggcagtcactggcggaaagaccgtaggctcgactggacctctgctttgcaaggttcctgtagctttctatatcgctcgtcatgctcgtcataccagccatgatcaaaggattccgaaaccctcaaaaggcgtacggtggacagctgcgagcgaccatgacaatcaaacgtgatcgcttaaatctcgtcgtcggtttcatctttgcgaggtcgtccaagtaaacaaaacaacaacacgaacgagaagttttcagttccagcttgatcttgcttactgctgtcatccctttgtgacggtctatcatcgggacgtgtatataccacgtcgtccggtgagcctttcatcctttagtcaatctgccgagtctctgatcaggattcacaggctgaatctcccggtgacgatcttccttcgactagacagcgtttctgagcgtcatcaccatgtctgtcgttgaatctcggcccaccggccctgcctctcatatcccaggacaccccgttcaacctatcgttgaacctcaacctgtgattaccgagaagaggtccatgttctctcgacgcaagccggccactactcagccacagatgcatggtggttacgggcacgccaagagtaccgggcacgacgagacgtacgccgggaccggatacgcggtgaacggaccttatggccatgggttcaagtttgggcgttggatcaagtgagtctgaagcggtatccctatcgagttcacatcggctgattgggcgctttgttactcctttcgacgatccctttcggacgaccttcctttgacgtgatcttcctttggcacaaacactaatcgactgtacctctgacgactactctgcgacgaacaattctgaaggctcaacatcctggatctcttgaccatggccgcgatgggcgccatcggtctaggagtttacgaagccgaccccgctccgaggagacatttccccgtcgtcgttcccggttctgtcaccacggctggtatgggagaggctgtataccctcagtgagttggaacttgatgagtgcacgtggacgacgaggttgaccgaggatgtgtcttgtcgacaggttcgcttatcccgtgagcgtcgcgatgctactgcagattagggtcaggctggaagctgatctcgcgtacggatctgtagtaccgcaccaacatcatccccatttatgccgccgccttgatcgcgtttttcgtgccgttcgtctttttcgtcttgttccagatcaggcatcgttcgcccgggatgcttcgtgagtcaatccacagacaccgatcggtgacgatcacggctcatgaagctcctgcctccttctcagttgattcgacgatgggattgctcgagggtctgatgtgagctgtccatagcttcgccatgtcgtggctggctattgacgtcctttcacctcccttctatagtactggtgccgtcttccaagtcttccacaaatggctcatcggcggattgcgtccccatttcttggacgtctgtcaacccgacttgactaggcagacaggagccggtttcttgggatacatgtacacgcgggatgtctgcactgggtgggtccgggtttatatcatgtttccgtgagagcgccgcctaataccttgtctccaaagcgacgaggaccgaattaacgattcgctcgagagctggatgtccggccattcgactgcggcgtttgcgtgagtccaagaccagatgtcctgatagggagctgaagctgatcgttggtcggatcatgtgtccggtcgctgcagtggtctagtcgtgagttccaggtcgtgatacacagccatcgtgtcttctactgaccttttgctccgaaacagtacctcttcctatacttcaatgctcaactcaaagtcatgtcggaccatcgcccagcgtaagcgactgattcgccgaggacagcaaatacgcaggaggtgctgaccaccagtgccgtcgaatccagatactggaagatgatcctgacgatcgcccccatcctgggagccagtcttattgccgcttcgttgaccgttgacgagtaccacaactgtgagcggaccgacccacgtccatcctgaacaactcgcgacgaactgctgatcggctgtttctgcagggtacgattgtgtcggaggtgctcttaccggaactttctgtgccttcgtaagtccttcccgcgggttgatttctaccagcatcgccgtactgacgatacttactctggcagatcgcttaccggaagacgttcgctgccgtatgggacttccgcttcaaccacatcgtgactcctcgtgcgtggatctacaaagctgcgaccgctctgtgaatcgcccgctgaagcccaaactctataggtactacctcgctgttcagccgccacgcgcttgaagggttggcccgcaagttcacgtatgatcatcgggatgctctagctcagaggcccgcagccagtgaaggtaagcaatcacacggttgagcgcgagtggcataccatactcacgtcctggatttgctacaggcggctggagggagcagccaattggaggcgccccaggagatgcgatcggtgcagcgcccgcggacggtaccacgaccgggccgtccgcgtattctgctaatcacgtttaggattgcagaccttttgcctcgtggtgacctctgtttctcttggctttcttctatgatactctctccggtctgtgggctattaattcgtgcttgaacgtatataatacacgttgactcaaggtagacaccaggccgcatcgagtgagcaaaaggaatcccactgagttgaccgaaactgcgccaggacaatcagggctctcgactccttcaaatcgaaatgaaaagtttcgtgtatcttcggtgttctgctggtctgtttgggatagtcatcggacacttctgtcggacgtcagtcgccggccgccccctcgaaagctgtcttgcaacgtggaaggatcgagacgatgactaacgggtttcatcacttggtcggaagtcttgtagggctctcgttttctcgcccattgattgactcttacatcgaggagcgattggaccgccacctctgcacgggacacgcatacccagctgcattcaggctggtgcgcttactatagtatcgggcggttggccgcgtggctctgcctgtcctgctcgagcagtaacgctggctttttgatgattcgcgtaacagtcagtaattagtaaaaagggggattacgtccgttcggatcaatcgtatatcccgcacaatacccactcgcatcaccgggatcaccggctgagcgccgaggtcgacgaaaaagatcatttcgatccatacttgctcacccagaggtcggccctcggtagctggggcccggcagactccgcgctagatcgctatcagcggcagatggacttttcacgacgggttacctcgacatcagcgagcgcttatgacgagagtacccccgcaaattccgacctcgaattcaggccgggcagcctgacggcctatggcctatacagggattcgacatcgacttgttctagagatccctacagaggggcagcgcatcttctccttcaattcatctcgaagttggatagaccacatctctcgaaaccagacctcaccacgtagacggatctgttcctcagcaaaactttctcgtccaggtcgaacgcgagccatgccaatcttcaaacgagactcaaacgttgccgcggagcaggtcgaggaacatcgtctccaggcgaaggttgtctctccggatctcgattcggacccggaagccagggtcgtcggggtcgtcccagaggacgacgtgtttggagcttccaccgaagacggtcccaactatcgcaatgtccgtcttgcttttcatctccaagaaataagtttgttggctgaattcgtcatccatgatcttttccctacctgcaggtcggatggatcgctaccgccgtgctcatgttcaagacccaggttgggctcggtgcgttagcctcattgacccctatctctcctccgactcggttcgacactgaccgcccacgcttgcgttctcaggtgtcctctcattaccctcggtcctgcataccctcggaatcgttcccgggaccatcactctcctctcggtgggagcactcagtacctgtaggtctgaaccttgaaatcacatcacctcgcgtatcaatggcagactgatcagtttgacacgatacaggggggatgtacgttactggaaagttcaagaccaagtacccgcaagtgtgtaagtcagacggaagcttctgactgctcggtctcaactgggtgcaagggtatctcgctgatcccagttgagcctgctcttcgcgttgatcgtcaacagacagtttcgccgatgtagggttcatgctgggaggtcaacccgggcggatcgtttgtgctattgcttactggttatgtcagtcattgacccgtctttccaacgcgagcgtctcgctgatcttgcttcttcgatctctttcgataccgctctcaaacagacatgaccatcatcgctgggtcaggtctcctttcgatctccatcgctttcaactcgatgtccttgcacgggacctgtacggcggtctttgtcgtcgtcgccacggtcatcacgttcatcctcgctagtatccagacattggaaaagatcgcctggatcacctacgccggtttcatcagcttggtcgtttcacgtgagtcgccgatgtcgttgtcacgaacatcgaatgtaacacgctgaattcgacctggtattgttagtcttggtcgtgacgatcggtgtgggcgtcgcagatcgacctgcggaagctcctcagaccggtccctggaccaaggacttgcacgtgttcaacaaccccacctttggtcaagcgatgggagcgatcggccagcaggtcttgtcggtcggtgctaccccagccttgtaaggcggtcgtcgggtcgttcggtacggaaggggagactgacgcactccccttaaaatccctagcttctcgatcaagtcagagatgaggaacccgaacatgtacaaccgatcattgttggtctgccagttgtccagcatgtcgttttacatcgtgagtccgagcgcttggcaagtacggtctggacgtctctcatacgtcccgttcctcatacgtctcgttcaggcaatcgccacgacgacctattactatgctggtcaatacatcgccagtcctgcttttgtaagtccgcctagatccgccctgatccatcgatccaagctgactcgaatgtcggctgtccatgccgtacagggaagcgctggtgtgctgatcaagagaatcgcatacggcttggccttgcctgccctgttcgtgtcgtgcaccatctacactcacgtccccgccaagtggatctttgtcaacatcttgaaagggtctgaacacttgaccaagaacacgttcaagcattgggttgtgtggttcgggtgtgtcttgggatgcgttttgttctcatacgtggtcgcatcgtaagtgctcgtggtcgccatgaagcaaacatgtcagtatcgtggaggctgatctgtctaacgcacgtccactaagcgccgtgcccgttttcaatggtttggtcgggctcgtcggagctctctttggtgctttcctgtgcatcctcgtcaccgtgagcgtcccaagactatagggtatcgtgagctttggcttattcaaaggtactttaagtctctcatgtggctttacctctacggagctggatggaagaccggcgggatcaagctcaagcttgctgtcggcgctcacgtcttgatggccgtgaccggtgctttcctgatggtcggaggggtaagtttacggccggtattgacttgaaaaaatcagactaatgacaagcatgatgtgtcgcagacctacggttccattctcgacattaaggcttcgttcgacagtggcgataccgccagtccttggggctgcgcagacaactcgaactcggtttgagaagccagcagaagaaggccgaagaaccgcgaagagaaactcacaaaaaagacatcacaagaccttcaatgtatcaataccagcatcagcatttcatcgggtagacgacacgcagtacgagtacagagtagacagacagacatgcttgcaggatatcgcatttcatttaaaatgatcgggtcaccttgccattctcatgtttgcgctttcactcgcacaatccactgtctacctgcccaactaatgaccttgccctcctctgcctgcgtaatcacgtcctcaggaacggctttcagggcatctcgactttgatcgctcgtttgccgaattcgtcgccactctgatccatccctctggtccctccatccatggaatgaccccttgcccgagtccatcaagcccatcctccatcctgcgacctgggccaagtacgccttgccctgtctgtccccacccagggattccaagagaacggcatcttcgcccgcaggaacgggaagtcgctgccacacctcctcgaacgggacgtaggcctggtcagacgagtccgggttgggcattcgaccagcctcgagataccggttagagtctagcggtcggatggtcacgtcgtcgggggtggtggcgtcgaggggactatccgtttcctcgggattgaagaagtctttggcgagcgcaggcaaaggctcgctgtgcagtccccggtagtcgatgatattcaaaaatcgaagcttcgtaagggctgcaatgtgatcggataaattagctcgaagttgcgcggaatagcattgtcttcgtggaacttgctttgagtcgacccgctcagtatctgacggactccggccatcgcccagtcgacctgccctctacgttcccccgatttgtatatccgcaggtccatgaagtacttgcccagctccatagagaagacgtcaaccacctcgccagcaggctcggggacccatcttagggattctcgctgcacaacagcgatgtggggttgttctcgcgcagaattcatgtcaaaaacgctaacgtgctggctgcttctggttggtaaaggttcctgatctctctaggctcagacttggtatggattcctcgctgcagaaactcgggtcacattgtataaatgcgatgaccgagatgggtctggattatccgcagggacgtcgggtaaactcgacagaagccctcgcgacccgaccgtttcgaatgttccgaactatcccacgaggacgatcttctcgatcggaagtcatctagccttggtcgccctgaagaggtagctccagacatctgacagcgtcgagccgatcgacgtgatggacaaggcaatcaaatgcgttcgagaacggtctcccgagttttacttgcgatgacccgagcaaatttacttccgttgaaccgtgaacaagcaacaagactgaatggactactgtatgagtcctcgactcacgcggttgatccggttcttgagagtcgaacctgtggagcatacagcggtggccagaagcaccttcacctttctggactgctaaagccgcgatcttggttcattcgtctggttatggagacgcagtgctgtacaaggggattttccttgaccgataccggaacccaatacaactcgtgttcgaaaacatgccgagtttctcttcaatccggagtattgggacaaggatctgcgtcgagtttcgatgcttaggctccttacccttcggacataaggaaagcgataccctgagagacagctttacgctttcatcgtgagaaatgtctctaacatgttttggtaattcccgatcaaatctgggtagagtactgccccatctaacccttttccgaatcgacgattttcagtccttcctctttctctagctgtttcgctgcttttcgctgtcgatacagcgacaggctcaaccataacgctgctacacaaggactcgcaaaggcactacctcaaggattattcagtcttgtagtaccaatcacgcagctaatcgcgctggctcaccagtacagacccgggccaaggacgacccgatcatccggcgcccttgttgtcagccatgtcagaccggccgattctgcggccggccgccaatcccaagcgctcgcccggaagtagaatagaagtccgtatacgacggccaggaaagcagaggaggagaataaacccaaagccgcagtgatcacggccttgtcataggggaggataaggtttcgcttggattcgtaccagatatggtaggccacccaagcgccgtgtatgaagaataaaaggttgagtatggtgcaacgcgggaggaaggcgagattgccccatgccgcaggacgcgccgaccatggcccgaggaaggacgaggtcggtcgtgtcgcatcaccggtgctggcggagcattgtgtttgagctgcgagtccaactgtgcagattgtgagcccagacagcagccgactcacatcgtgtcccatgcgagtccattccgcgccgcaaggtattcttcactatcgccgtcatgcctggcgagacaccacgactcgctctggaccgttgtgaacggggctatcaacaaagccagcgcggtgtacggtaacaacctttgcatcgcgtctttccatccgggtcggaggatggtacgccaggtcacaaaattcagcggatggagctggtgctgggccataactcggtcgatgatcgcttgacgggcatcgttggctttttgaccttgtttacgaaaggcgttgcgggcgtggttcacatgcttgtttatcttgatcaccttacgtgggtcttgcaataggtcaggcatgagttgaacgaaggaataggagcaggatgcaagtatagattgaacgagcagagtatgatggataatgcagcgggtgaagacgccccgatcgttcagcgtaatggcttggacatgtgaaataatcaatccaagcgagacaagtgggtaacgaaccgcccagcggcaaagttcaaacacgattgcatgtgccttcctttgagatcgcgagccaagtcctgtccccactatacggtccgaaacgcatcgctatcaagcggggacgactgaacagctccgcgagccccgcggcggtcttgcatcgcggaggtcgaggcgtatcaccaaggaagcctgatcagcagcgcgtcgccgcttttcaggtcagctgtcgaccgtcggttaggcgataaatagcaaacgagcacatgtcagcgtggggcacgcgccgcgcgctagtgacatcgacatgccgcatcggcgacctcgctcatcctgatgcctgaaagatcagttttttctctctctaagcaccccaccttcttctggggccattcgaggggcgtcggggtggacctctgtgcccctcgttgcgggtctcactcatccgcaggcgtctaccaggtcgactatatagtctacaagaacgaacacgtcttttccgtcgccaatggatcgcctcgacttgtctcgacccgtattcgccgtgtttcagctcgtgatccgcaatcatggcgtcgaaaacagacattatcaaggtcgaagagacccaacatgatcaaactctgccccacaacacgggcgggtcgccttatcacaccgacatgacctacgagagacgtctcaaggtggaaaagaagctcaaactcaaacttgacgcgaggttcagcatcttggtcgtcatctacatcttgaactgtgagtgcatgaagggcgagctggcatttacaacactctgacaagctgtcatcccggtcccagatatcgaccgaaacaatgcttctcaagcgaggttggccggattcgaggaggatctcggactggaaggccaggaattcgctacggtcttgtccatcgtctatggtgagcatcgtgttgccccgtgacaagacgccgaaccccgtgcttaaccccggatgttgtctcggcgcgcgccagtcgggtacattttgatgcaggtgccctcgaacatgatccttgggaagatcgcctacccttcgtggtacattgctggagccatgttgatttggggaatgatcgtgagtaccgatctcgtagatatcctgatcgatggaaagctgagtttacccgcacgatcctgtgtagtccgtcgttaccggtgtctgccgcaactttaccgatgtgctggtcgctcgattcttcttgggtttcgttgagggtaagttgggagctctgtctttgagtgcggggttcagctctacgatgctgattctaccgggtcatcgcttcatagccgtctttcttcccggcgcattgttccttctcagtaaatggtacactaaaaaggaaattgccgtgagtttgtcgtttccgggcgagaatcggactagcattaataaattgcccccctcgccctccaacagttgcgatacactatcctgttctgcggagtgagtgcaggccgaaacgcgccgcctggcaaagggacggtactgattcccctcgcttgaacgcggtattagaacctgatctccaacgcattcggctcgctcatcgccgccggtatcctggccaacatggagggagtcctcggacaccgcgcatggcgttggttgttcttcatcgagggtgccttgactatgggcgtcgccatcatcgccgggttcatgcttcccgacatgcctcacaactcgaccggtttcaccaaagaagagctcgacgtcgctcagcttcgactctacgaggatactggcgaatctgacacggacgctcaggaccagcccatcacatacggacttcagctcgctctcaggactcctcgactgttagttgatttgcgggaacgttgcgtgctttccgggtcgagtatctgatccgttccggcggtctctctagttacgtcctcatgttagctctcatcgccgtcgtcaccggactttctttcaacgcttacttgtgagtagagccttctcctcagaaatgcagagttggcggctgactatgggtcccatctcatattcagccctaccctcactggaacccttggatacgacaagaccaagactctcttgctctgtgctcctcctgtaggtcgccgcacactttcgatcaactcgaacacgcgctgatcacgttgctctatcagtgggtattctcgtgtttggtcgccctcgtcaactcgtggcacgccgacaagacgcaagaaaagttctggcacagcgtctggcccatcggcatgggaatcgttggattcatcatttcgatcgcgaccatgaacacggccgctcgatacctcgccttgttcttgcaaggtcagtctgcgccgtctttatgcttgttacagtggcgttgatactgattaactcgtctgatcgcagccggaagttacgctggatatgtcattatgtattcttggatggccagctcgttcccgcgacctcctgctttgcgagccgtcgctattgccttgctcaacgccgtgtcgcaattgggaaacatcgctggaagctacgtctgggccagccaatttggacccagttaccggtcgtcctacatcatcgtgctatgttgctttgttgtcggcgtcggctgcaacctttggttctcgctgatcttgagaaagatgaaccggcagttcgaggaggcagagaggcggtgggaagaggctggggaggatcatccggacgatgccaacacggtacccaagggattcaggttcttgtcttaagcaagacgtagtaatgacatagatgtattctttgaacacgtagtaagctctgcataaagcccatgatcaatctgattgatgtaatgcacaagttgcggtctggcatttgcaacatggtggaccaccgtcttgtcagaatgcccagtctcccatctagacgacgtccatgtgcttgccgcaaacccttacatctgggttcaaggtgcgcattccacgagctgatcgagaagagacgttttctggaagcgttatcacgcaggttacggaatcatttgctgatatcccgggcggataggtgtcaagcccggcataaggagagaatcggtgaagcttctgtcgaggacgatcagaaagcacacgctcgatgggttgcgcgggacaaggcattggcagcgcgggggggggcgaagagggtattgaaagaaagggaccgattgacaagtggaataagactgctcgagccctaatgaagaagccataagggaaagagaaagtctgcatgtatctatttcggtctcagacttcggttgggacaagatgccgacttggctttgacattcctgttgacctacaagatacacgtataactgcttacaataaaggcccccttttggctcgcatctagtccgcttgaaaccacgctcgtccctcgccttagtgtaattcgcctcgggcgtccgcctcggccacctttgtcaataggctaacctgatcggcgacatcccgcaagacccccaaaacccgcttgttcccctcggtaaagctgtactcggcgtactcgatctcctgttcacgacagtattccttgacgagcttgctcgcccgtcgcaagttgtgcctgggtatgcgtggaaagagatgatgcgtgacctgaagatgcagaccgccgtggaagaactcgatccattcgttgcacacgacgtccatcgtcgtgcgtagttgccgagagacgaatgattcggatggaccgaggtcggctgtcgatcgggcaaagtgcgacagtacgatctggccaaaggagacggtcaggtcagcgttctggcactttgactctcgggtattgcgcgcggactcacctgcacatggaccggactggtgacgatgtggctgaccaacaggtacccgacccgcagcttccacccttccagacttttcaaaagcattccgaaccagctccagaaaaagaccagcccagcgagctcgaacgcaaaccacttgttccgaggcatcttgagcgcgaggtagccgtacgaattggcatagaggttgaatcgggcaaatgctaggacgatatagtagaccttgtgcctgcacaaagagatcggacatcaaaaatgagccacccgtacgtctgcagcatgaaagagcacggcaaactcactgaaccttgaccatcatgttgctaaacccgtcgaacggcatgacccgcttgtaataggtcgaccacaggttgccgaagaactcggtcgaaatggcgaagaatggaatgtgctggatgtcgggatcgtgttcgggatgattcgtaacaactgcaagggacgaccggtcagccggtcggacatcgacttggtcatcctcggcgattcaactcacgatggtgaatgttgtggttctaacaagaagataggccatggtcgtgagcgtgaggccttttctgatcgtgtcgaacggctaccctgacgactcacatctttccaccagctcaagctcaacccgcccacccaattggccacgatcgttccgatcaacctgtcctttcccgctttgccggtgatgcccgtatgtccagcgtcatgtgccaggactattcggaaatcaaaaaggcgtcagacgtaaagcctttgatcgagatccggaagaaagcggacttgcatgtcaattgatgccagaaggctccgaggaagacggccgagcaaaagaatccccatggacccgttgaactgtggtagcggtagcgaatatgatgttagcacaaccctactctggaaacaggccataaacatcgactagggactgaccggaagtagaaccccgctgccagacccgccaagagggtgtaccggaccaggtccccgaggtaacccttgtgccaaccttcagccctgaacaatccggctcgctccagtcgttcccttagttcccggtaggccagactccgtcgcatctcctgtttcgggtcgacggggtttcctgatgggacctcgggacagtgaatagagtcgacctgcacgggctcgagcgagaggggtgtaagactagggtagtacgaggtggattcggccaggtcgggaatgtgggcgtaaagctgcgtcgatccttctctacgccaacttgttgcggactctggatcgtgcacaagcccgagagcaatgggaggagtgatcggtcgccatggctacagattgaaagccagtcgagcgcgtcagctaaacgtcgcatgaggaatgcccggtcgcctcaagcccaccttgttctcgatcttgccaacgacgaaccccttgacccgtttcaagtcgtttttgctatgatacgcatccatctcgtccgaagcatcccgcccgacgaaatgcaacactgccaacgatccaccggggtgctgatcggcccatctcgtaaggtcgaggacgtgtcgatggtagatgaccaaattctgtccggcgatgatccgctcgacgagttccgagcgaggaatgatcctgtcagctttaagggtcgatgacgatgccaaagccgatggtgtagggtggtgggaatgagagttgcgatgacaagggcagttcggggtcgacctggccgaatacgagttgttatggttgatcatatcgttcgaatgaggttgattggcggttgaaagtggaggtcgacccgtcgatcggtgacttgtttgtgagagggaaagagagaaaagtccgcagtagtcgtcgtcggtgagcgacggtgtgacgtctgcttggctagtgataccttggagaagcgaacgaacgtatagcgaagaccaccgtagtttcaatatcgttgttgtatcgtttattgtcgtcccccctcgatctctctgagtcaacgtctacgtctgctcaagtaagcaaatcccgggaaaaaaataggtcggtcgccgagaaaatcgacctccacctagtcgaattttgaggcaaaagtcgggtcaggtcgatgtcgttggacctgggcaaggcgagctagggaaaacgatatgcttgtgatgctacgtctggcagagaccgagactagagaagacggggtctttccatcaacgaattcgtatcaagatggctgtctccgtttgggcatagtcggcctggtcgtcgatcggtgcgccggatttagcgccaggatatgagtaagcaagactgaccgccgggatgtcaatcgatagtccagacagaggcgtactcgaacagacgaaggtaggcgtggcacagtggtggtggaagaaagtctatactatcaaatgtagtcccgagctgcatcgagttgcattcatggctgtaaataccgggaagaagcgacgagtccgctatactaaaacgccacacgatgaacatggaatccgagcagaatgacgcctcatcataaaagctctcaacagcatatctttcgaaccctacggacgagaacgtagcaacgacaaagtgttgagcagatagaccgagcaggacgcctccatggatccccgacctcgagtattcctaaatgaaaatgaacaaagcagaagcacgacagatcgaggatccccgactctctttcgagatcttaatgttccgtcaggtgtcatgtgtccccgggctgcatcaaacgagcacgatgcacagatcgcacagatggacttgtgcgctggagctcggttccgaaacggaatggtcattcgttccctgttctgcatccggtcggatctagattttgatcccgtcggtggcgattctggttcaactcgccaccttggagcttcgcttcaaaaatagcattcaattgaaccactccgacctagatctggcttggtcagtgaaagctccgaggggaaagaggaaacgtggggttttatcagccgccgggcagccctggaacctggaggaagtttccaaagatcgccctgcttttgtggctatcggagactcagcattatgactccccgcccgacctcgctcgctcggaggttcctgaacgccatgatactccgagagtgcgtcgaacggccacgcttcgacgacgctcgcggcatgatgaaatgacgaagagctcacatcgatgactgggtccgcaacggcccgagtcgaggtcccagtatcgaacattcgaagggtacttacccaccatgacaagcaatagcacggtggaagctcgtggccgggaccggtagagattcgacgagaggtacaccgagcaagccacagcgggctctcgacgaggatataaatactgcaaccaagatcctgacaccactaggccaacctcggcaagatgtttcgtcctcgaacacaccaagcatcttgcgacgtttctctgccaaggcatcctattctgacgcgaaatcgggcgaagcgtacgatgaagaggatgaccccgttcgccccctctcgtcacttcggatgaccagggagtgtacgcggcagaggagactcgtcgctcaagtcttgctaggattcctcatttccgtctggctcattcttcaatctcactcgataccactcgtcgggaagatcttgaccggcgatgtcgttatttctgggtacccgcggccggccgcttcgcatcccaagatttcactggtcgtcgtttggacaggggatgacttgcccaagtatctcggctggttctttgatagtatagctcgacagccgcaggagctcgagctcgtcatcgttcagcgaggagatcgccatctggatctgacgccggccatcacccaaggggccacgaatatcaagattgttcagatgtcaaatgaacggtgtaggtcgagagggcattcgattgacgtcagcacttgtgagctgacagacggagctcgtggcgtgatcggcagactgggatctgcaccgggcgtacctctgcaagaaatggggcggatgcagtgaaactgatagccgccgaatcgcggaacatctggccaaactcgagcccatcgacccagtaaatcgctacagagattgagcgtattctagcgcacattactcagctcggacctcttgcatcgaatcgacagcaaagttacaccctctcgatactgcggggcgaagtcttcaaagcgtatatcgatccgcgggccgagtggtggggatggtgcgatctagatactgtgcttggaaagtaagcgccgtcagttcacgtcgtgactcgtgatacagagtctgatcagagagaacgattcggcgaccggattgagtagctttaaacgcaaatgcaagtgccaactggttttatttgggcagcacgatcgctggctgacttgacgacgctccgacagttccgtgggatatcgccaaggactacgacgttatcataccaggccattggacgcgggatgtggatcggctcgttcacctcaggttcgtcggctgcagtagttactctgcaggccgacaactgagccaatccttgacgtccggatagaggtcacttggcctttttcaaggttgcgcttgagtccgccgctagattgaccgcgcatccacatttcgctaccaaggaaggttggctacagtctaaatattttcacgacagatggagtacgttctgtgccgctcatatgttacgattctttcgagactgatcgtggtcgccttgcgcctgttcgcctctgatcatcaggatgtggcactgaaaagtttttgggttgctcaccaaaggaagccgtatattcggattacgttatcaacaatcccagtatcgattttctctcctttgacgctctggttcaggacttttatggagtggtgacgcgatacgggacgtttgtggtcttcccgggatgggccgatgaatctcggttcgggcgagtcgcacaacgcctgttttcaaacaacagctcgcccgtgtcgacgttcagcgacctcggacagacccgaccggtcgagttgatccggggcaacttttcctctgatgtctggttcaaccccaagctgtccaatcactatcggcccgagtacggtcgaggtgatccggcgttccgggtcgaagattacgtgtcatacttgtatcgcaaggacggtgtcaccgaagaacgcttggaacccgtcgagcggatagagcctcatcccgacttggttgaagaatggttgtacatacattggcaggaggcaaagcggaagggcaagtggccgaatgaggcagcttttggatacagatggtgtactgatctggcagatttacggcacagactggttcaagcaaattcccctcgatcacgggagatccggcgagtggctcttcctcacagaaggtctcgaggccggcgggttcaaggagatacaagtccagacagtacaatataagatgatatccacatgaatcaccgaacacatcgaaagctcggctgttgggataccaaccgggttaaccagagggactttcggcttggggtgtccataaagcctgactcggagggccgtcgtggaattcgcacgtacttgtgctcggaattgttcaccgacgatcacgcggaaagggcgacatgaactctgcgtcccttctgccataggtaacaatccccttcgtagccgcttttctgctgtcagcgatcaggccgagcaggtcgagttggcctaatcccatcccccgtcgacaaccgtcttgccccactttttgacaaaatagccgacgacggctggtccgataatggtgcaaatgacaatagcccagatggtgatcaagaattcgtcatcgtccagcagaggttccggtgtcgagtaggcgatttgcgagatactgtgcgaggaccaggtgatgggatatcagtgaaagcgtctctaacatcttgtgatagatcgcaggctggctcacagcaaaccgatttcccctcgagcgatcatcgcgaacccgagcaagagcgcacctttccggctgtctctcgcccggtctctcattcccccgatgaacgttccttgtgaaccgggaatcttccaaatgagcagccatgccccacagaacgccttgacaagggtcatcaggatggcgtagatgaaacctctccaaatgttttcgcccttccacaacgggataaacgggatcgaatacccgatcgagccgaaaaagatgggcaatagcatggactcgagtacgcttcacctgagactgctaatcgcgccaattcatcactgtttcaaagtcggcctcctttgatgccaacccctgagtcgacctttcgaaggtacccctgaattcttgtaacgacgcttcaagattcagttttggaagaaaggggaacgtagcggccaccaggtgccggaaagtcataaaaagccaccacgcggaggtgacgacagaactagaaaccctaatccccgatcaaagcgatcgacgattcgcaatcttctgataggtcagcggtcaagcatctcgatcatgcgttctatgcacgcgcaatcgtcaattttgctgtttctgtcactgcagatcaaaggtgaggatggcaagtctacgcgacgaaatctcgatactgaaatttgccttttattcgaaaggtattcatgcggccaacacaacgcaacaagaaccaggggcgacatctagtacgccagtcccccagccttctcccgggcccactcaacctgatgtcgtaattggtgaagacctggcgcgcttcgtacgcatgcaggaatgcatccaaaaggatggactggttttgtggaaacccatcgtcaccgacggcgccgatcctggttatgcatctaagggtatcatcaagttggaagatgttgtcgctttagagggcgcttcggaagaagattatgcctatcactcacgcatggctgtcatggctgtctgggccaacgtaagtgcttgtttgttttggtcagattgcatcccaaccatacgcgattgaccatcttcttgcagttctaccccgacaagatcccaggcatgatcaaagtcgggacaaacgcgtctaccccttggtgtatcaaggcggatacgcctgaactgaccttaacgggcgccaagactgccgattacatgtacggtcacgtcaacgggacaaattacgagaaatctggcgcagatctatctcaattacttgctgatggtcgcaccgccaagaacgtgggacctagtcttgcaaagtggccttggcttatcggccatgtcttgcgtgacatctggggtaaaaactatgtcgatggcgacatctgtcggaaaggggacgcgtgcggtgaagtcactggcagcttcctggctgcgttggctggccaagagattgggcaggctggtatcagagcatcggtacgagaagagactacgaaggcggtcatggccaaggctgagcagatggtgagtgggcatagcgtcattttctcgttgcccactgatggatctgcttcctttatgtcgtctagcccgtggtgttgttgactagccagccacctggcatatgggctttgcttggtccaaagaaaggggctgctgctgatgtgtacgaaatatggaaccacaacacgggcaatcgagaggattatacctgggacgtctccactcatgtcgtataccttcgagacgcttgggatagcatcaagggtcctgatggtacctgatgtactcgacgaagcaaaggtccgatgttactcaattgcgtcatgtagctgagggcaagcgttctctgaaggcgagctgaaatgcgctcagattcgatccttgtatttcctcctgtttgtttctcgattacaacttcttcctcgataattcgactcctccgcccgcgggacgatctcactcggtcctgctttccttactgcccgacttgtcaaacttttcctgcaaactcttgtacatgtcctcgacgctgaccgataggggcgtgtacttgatacccagctccttttcggccttggcaccgctgtggatgttggtcttggcccggatctctttacccttgccgggttgaccgacaggaacgccagggatcttgtccccagggaaatcatggatgatgtcgactatgggggccgattcgtggtcagctctgggttcatgggatgtaccgggagtcctgctcgatgcgcaccgatgtcttgtccgttgagcggtccagccgatacgatgaacctgttgccaccggcttcgggcttggtcaacgccaagacgtgagcctgagcgacgtcgcggacctgagaaaggagtttagggtgtcagccgtgatcaccggattcttgccactgtccttcggtcgactcacatcaacccagttacccatggcctccttgaggtcgtcgtctgtctttttaccctgaataaatccccaaaagttggcgaccgaggtactacgtgacgacaagggcttagaaacgatccgagtccagcctatcggtgcacacggcgcaactcacttgatcgactcgggagacgagacctggtgcataatgggccccagaacctaaaattggcgactcggcgtgaatgcgtgccacacgtctgctctgtagactaggtgactaaccaagggcgggttgatcgtagcgaaatcccatgaagggtggttcttttccataaactctgcgagagcgagagaggatcagccgaggttcgagctgcagggtaaaccttcctcacgatccgagactcaccccatgcagccttttcagccagggtctgaccgtacaaaagcgatcattagctttccacgactgtcccaggaacgaacacgcgcactgaccttgctcgccctgtacttgtctgcgccgggggcctcgtgaccctccttctcgatgactccgggcgagtactcgttccagtcctcttcagtgaacgtgtaaggggcaccgttctgatgcctcggcccggtaggttcgggaacaataacggcggcgaccgaggaagtgattacgagtcgcttgaggttcgagctgtaggtcgagcggcgaatcaagtgagagaagagcaattgatgggattaggacagatttgcatgtcgggatgcaggccagcctcgccgagctcggactgacttgttctccaaggcgctctccatgatcccgacggttccctgcacggcaggcttgatgagctcgtccgtggtcgcagcatcgaggtagaagctgtttcgagattggtttgaggtagagtcagctacgggtgctaccatttgtgatcggggtttgcacttgggactcacggcgaggcggtgtgagctgagaggtagatccgatcgtcagccagttgcgcggagggctccgaaacggtattattgacttaccgattccatctacgcccttgacagcctcgtcaaaagcaccaggctacgatgggcaagtacaaatcagctcctagcatcgcaaagcaggtacgccttttgtctcgactcgccttggcgatgtcctccacgatgacatagtcaaactcgcccactccgtcaaacagctttttcaagtagtctcccttgtcgttcgatcgaaccgttcctcggacacggtagccgttcatcaacaagtgagagcagaggtgaacggcgatgaagccggaagctccagagacgaggatgagggaaccttcaggtctggagaacaagtacaacgtttgtggagcgatacgtcagcgaggtgatcgagcttgctttgtcgcttggggacgtacactgctggcatttttctggatattaatgggtgggtgtgttattacagatcgacgttaggtgtatcaatcgcttgtcgaactagtaatcgttgtcatggtcgagtcgtagaggacgtcggtgtgtctatctatatatacatgctgcatgccacacgccgaactgctgctcgctccaaagcggcgaccgtttcgtcatcgccgatcggagaaagttgaaccacggaaaatacttgaaagcaccgagggacttcaatcgacatcatctatagcctcgagtcggtgattcaactgtctgagcaccctgctaacttggctgtctgggatcaccatgcaaggcttcaacaagtactatccgcccgattatgattcaagggagacgtcgacgctcaatagttaccgcggcgttcatgcgctcggcgtgagggcaaaggatatcgacaaggggatcctcgtcgtcaggtcggtcgtcaactacctcgtcatgggagacttcgaaagctaatgttggtttgtctctcgctttttccgcaggttcgagctcccgttcaatatttggtgcggtcattgcaacgtgagccagcaagaagtcgaatcgcccatcttctagcctccaatcgcatcctcggtttgtgctcgcgacagtcccatctcggtgcaggcgttcggtacaatgcacagaaacgtaaagtgggagcgtactactcgacacccatctacgcatttcgatgcaaatgtcatctgtgttccgggtggttcgagattcggacggatcccaaggtcagttcgaggtcggcaaagttgtatggcccttgaactgaaagggaaccgggttcacatcccgttcagaacgctaaatacgtagtcgaagaaggagctcgggcacaggaacaagactgggatccagaggaaaatggcgggtacaagccgcacggtacgttcgggtctggcaaggacagtcgcaaagtcgtcgccttgctgaacacgacgaacctttgtctgacagataccgaaggaccctccgccgccgacaaacccgccgacgcttttcaagctcttgaaaagaccaccattcaaaagactctggcagagaccaattcggagcgcatcgaatcgctggccaagttgtcctttcggcagacctcggatccgtacaccatgtcgcaacacttgcggcaacgtctgcgtgaggagaaacgagtcgagcgggatcgcgcgatggccgacgaggatgtcaaggggagatacggcttgggagagagggtcgcgttacttcccgccgctgctggagaaggcaaggcggagtggaatctcgccagatcaagaagagcaggtcagaactccaggaccaccgtaagagatctctcgacgaccttgcggaggaacacggtcgagcggtacaatccgttcgatcaagactctagctcgacctcgggctcgagcgagattagccgggtcggtcgaggcaagttgggcactgtcgtcaagagcgtttcctcgcaggcgagtcacaggccttcctgtccgagtctctcgacgccggggctagcgcgagctccagcggtgggactgtccggtttggccggatacagcagcggcgaggacgacgattcatgaatgacacgaattcgaggacgagttgtgagtttcgattacaatgtccacttgtttcgctgaaactgatatccgttcaggcattccaggacgaccataatgacaacttcctcaccgaggcacgaccaaggcttcaaccgaactacattactataagccaggcgagatgagatccaccttcgatcttttggtcctccaggacggttcggctcaatcatgaaccaagatcagtgctagctttgacaaccgccacaagaccgctcggtctcattctccagacccaaggtggcgagatctaggattcgcctttgatccctcccatcgccctggcgacccatatatggagaaggagaggtcacagcggatcagacacaatcgtccacttcaagctatcgattgctttggacggcgacgcgcctcgtagacggccatatgtacggagaatttgagatttggaccatctcttctacttctcatgttgtctgctaatcgtcgcgatgccgagacagacgcaacgcgcataacgtatcctgtaccgtcgtcgatatcatgtcgatcgctatggggcaagtctcgtgcccttgagccctgcggcgactgtgtgttcgggtccgacgtaaagatctcttaccggcattggtcgctctgggagttcacgatgctgtcctgctttgcggactgtatttggccggccgaagcgaacgagcgagcgttcggagctacgggtcacatgtgcggggcattcgcttctccgtacaaggtggacggcgtggacgattggcccgcgtcaaatgcgggtatgtaccaaccgtctgtcgaaatcttgtccaaacagctcattaactgacacttgtcaggagccagtataagcctaatccgatcagacccagtcgttagctgtctgaaccgcctcaaagtcattcgcgtgagatctaccttgcgactcggtccgtccacctgaaacgtcgagccacacgcactgcaaccgatcgcgcgataaccgagctccacgatgaacccgaaccgatctggattcgctgtcaatgacgatccctcgactccgaggaccgatgcaacggtaccgttcagggatatcattcctcgccccgatcatccccgaatcaaaggtatcgagacgcacgacgcacacagctggtgcgaaactcgcagacaggtcccggagcccgcctggttgatcaatcgtctagaccacaagaacctggatacgagctacacagggttttcgagtgatggcaaacccgatgcttcgatcttcaagtatggtcaggacgaaggtgcacctgtggaagaagccgttcgagctgtcgaggccttgttggaaggagttacggcagaggagaagcgagctgtccagtttggtgacgtacagacggatgtcatgtttcggatctggtccaacccggaactatacgtcaacccaggtgagtgctcgttgtaggtccgacgagatgatgcggacattgaccgtatcgcccatctcgtaggcggtattcggcttgacgaatcctcttcgacgacgcaagagctcgtgcatgatgttctgcgtgcctctttgtcctcggcaggatacgctaaggcagcggggtgcacctataccaacgcctttctcggcaagctcgtcaacggccacaaggtgctgaacgagcactcgtacaactttcgactgttttgcccgtcgtccggcccgtcaaccgttgcaccctggggttggtcgtttttcggccaccatctgtgtctaaacgtagtgttcgtcggcaggcggatggtcatcgggcccacattcatgggtgctgagcctgacagaatcgacgtcggacctcacgccggtttgaggctgtttggtcaagaggaaattcgagggctaaacctcatgcgagacctagactcggcgaatcagaaaaaggcacagctgaacgaggacatggttcacggtttggcggaggatcgatggaatccattcgacgagaggtaggttgttagatcgacccgccatcgacctctgggccaacatctttttgccttttcgtaggcatcttggaggtgctcgtcaagacaaccgggtcgtgccgttcggtgagtcgtcgatgcagttctcgagattgggctggactctgacctacgactgttgcgtttcttttccctcagagggactcgctatttgcgacatgacggtcgctcaacaagaagagatctgggccatcttgcgagcttttaatgtgtaccttccagaaaaggcactcgaggcaagattgaatcggcttaaaaccgtcgcctcccagacctattttgcctggatcggcaagtttggactgggagacccgtactatttccgaatccactcgcccatgacgtttgccgaagtgggtcgcggcctgtgaatacagtcgttgcgggtctgaagctgatggtcgcacttgtgatcctgcgcagttcgattttcattgcggtagtaagttgtcaactcgtacgaatgtccgggtttaggctaacgcccccgtcttgattcgttgcagtcttcctaaccaacacctctccagccaagtgccacatccacacagtgaatcggttgcccaattgcgaagactatggcaaggcattgatcgctcagtacaggagagagcaggcggagttgtaatctgaaagactgttattcggtggacaccagctaaacgttattcaatgttattcattgtcatgccaaacgatacaagtcgactatgttcacccccaactcctgcctctatccgaatctcacgccatgatgtcgtcgatcttgcttttcaaaaaagtgacgacggcatcgggtccttcgttgacttgtagtccagtaggaatggccgcgctaacaagaccgaaatgatgatagtcagtatcaggcgaaatcgtggaaccagctacgcgggacttgcgtcttgatgtttggaatggtctctttggcaatgcgctgaatttcggtttgctgctccggtgtccacatcgaggcacaaaactagatgcgaggaggatgagttcgttgtatcccgttcatagcgcgaactgggacctacgaggatgccgggtggaggctggatagatagaagcaaaggcttcactccctcgatagctagatagaaggttttttgtgcacgtaagccgccggaccagatttgatggtgaaaaggtgggtcttactttccgaattgcctgcatggcgaatgctatacttgtccttgacgtcttcgatgagccgtccgatgagacgcttggctcgctcgggagcagtgttgaccgagacgagattgacgggaactcttgagaatgacattgttgttgcgattgcgtgtaggatcttggcggcagcgagatagtttcgaggtgtagtagggccagcctccctttggtatgggcaaacagtgtctcgttttcattctcagtacttgactttcgatcgtatgttcgggctgactataccccgctcgacgatcgccgttcccgtccacttgcgtccacgcgctccgtggagcggccccgatttcacaccggccccgccggaaagagcgccgaccagtccaaagatacatcaagaaggcatcgttatcgtgacctttttcggatgaagactcgttcgccctcgaactccatttcagtaatcgtttcacgtagagacctgggttatgcaccgtacgatcagagccatgagttcctatagccgtaagagtcaatctgctcttggcgctcgtccttggtctgaaactgacacgacccaacgggacgcaggccttgtccgattcatccctcgcaatggttcccaagcaatcatcggagaacccgtggatactcagcaggatgtcggaatagcttcatacgagtcgcaggcgatcgaagtcgagacgttttccggttcatccatcttgacgcccggttcaagaaccggtcagaaagtgctggtcgacaggatcctcagtccattggccgaagaggaggttgggaccattcgatgcgtcggactaaatgtgagttcgagtcgcatgcttgacatcccaagcagtattaattgtatattgatctcgccgtcggtagtacatgaaccacgcgaaagaggtcaacatgcccgtaccgactgtacctacgttgttcatgtaagttgttgggcatattgctcggaggaaatcgcggcattcttactgattgcatcctacggatacttaggaaaccagctacgtctttagccgatccgtttcccaacccgaccgtggtgcccaaagctttcgctcaggacaatgcagcggattacgagtcggaattcgtcattgtcattggcaagacggccaagaatgtctcggaagaggaggcgatggactatgtgctgggttataccgcggccaatgacgtgtcgtcgcgggttcaacaatttgcgcagtcgcaatggtgttattcgaaaggtttcgacggcgcttgtccgctaggccccgcctttgtgcccaaagaggcgatgcctcgtattggcgaggtcgcgatcaagggagcgaggaacggcaaagtttgccaggatagcaagctagagtacgagtcgatcgtcccgggacacggcacacgatctcatcgattgagggctgatatcatctcttgcttaaattagtgacctgatcttcacaatacccaagatcgtttctttcctttcgcaagggaccacgttgaagccgggcaacattattcttaccgggtgggtcgctgacgccggcgtgacgaaaccaacgctcgagctgatttccttcttgtccgtgttgacaacgcagaactcccgctggcgtgggatggtcatccgaacccaagaaccttttgcaggacggggacgagttcagcgtctgcatctcgcacggtgtgggaaccttgatcaacaagatagagtacgaaaagtagatggttcgccgtattgtagctcgaatcgtctagcctccgcccatgatcaagatcaatgagccgaattctgcccccggtcgctctcgagaccagtccgacgtgccgtgaggttctacatgcggccgcccttcagtcgtggtcgaggtgtcggccgtcgtaacgagtccgagagatcaggaactcgccgtcatgccgacgcaccggggggcgggtcaggggaatgcacaagtgacattgacagagagcggggcaccaccgtccacccgattgccgccacagcctcaacggtggactgtatttaactggagcacactcgaaagcgatctttttacaaacgaatcgaccagtgcagacattgctctgcgacaagactagtgaaccgacagatcagacacgatgactacatcctctttgcctcctttgtcggtcgccattatcggcggtgggatggggggattggcgtctgcttgcgcgatgggacgagcgggtctcaaggtggacgtatttgagcaggcgcccgcgtttggtgaagtcggagctggactcaagttcgtccgcattgacagcgaggtcgaggggattcgcgctgacatatcgactgtatagtctcgggccgaatacagttcgcactctgggtttcttgggtcttaaagacgcatacgaatcggtggccgaagtcgacaaggccgggggactcttttttgaatggtgggacggtgtcaaggatgtaaagcacggcgaggtacgtcgtggcagggagccaactcgtagacatgccgtgcgattgctaagctgcgcccgctgtagacatttacaaagtacccgcgttcggccgttcatcgagctcgattactagagatcctgcacgactcacttcccgagaccgtcaccgtgcacctcggcgtccggatcattgatgtttcgaacgatactgccggcaagaaggctcgtgtgcatttcactgccaagggagtccctcaagcgacagggcctccgagcctggaaggtggggcacatctcgtcaatggtagccagtcggtgcccaaggacgacgtgttcgaggccgacgtcgtgattggagccgatggcgtcaagtcgctcacccggtccatgctcgatctgcccgcacccaaggaagccggcgatcaggccagtcgtccgagcgcccatcgatatacgggtacatactgttatcgagcgttgatcccgatggaccaggcgttgaaagtcgacccacccaactccgaggccattgagaacacgttgcataggccgagaatggcattcggtccgggtcggcactttacgattttccccatcgagcagcattcggtgggtctgtgcgtggtatcgtgtgtgcgccggtcattcccgctgaccagatgtgtgggcagatcctcaacgtcgtcgcctttgtgtcggatcgatcgcggcccaaggatcagcgagaatgggagggtccgtggttgaagcatgtcgacgccgagacgataatacgggatttcgaaggttgggatgatcactatctcgaacttctcaaggcgagtcgcagaggggtcggtcgtcgtctcgtcgcatggtctaaccgagtgcccggcccgtgttgctagctcgtccccgataaccagcgtatccagtgggccctccacgaggtgctctcgcccgagacctggcgaaagggtcgcatcgttctgctcggcgattcggtacgtcgtctcaagttgttgtgtataccacgaccttactgactgcctgtcctccgcatccccggctcgctgcaggcccacggatcgttgccgcataacggatcgggagcgtcgatggcgatcgaggacgcctacgtcttggctggtctgctttcccgaccagagtgtcgagcggacaacgtcgaggcgttcctggatgcgtacgaacgggtgagacgaccgagggcgtacgagcagctgttgaatgcttgcgagacgggcgaagtgagtgtgccgactggtagtgaccttcactcgccgccgctgatccacgatcgatgtcggatagatgttcgaatgggcgacggacaagtgggcagacgactcggaagcgatcgccaaggaaatgttgacccggaccgactggatttgggatcacgacatccgggacgatctcgagtgggccgtcgagtctttgcggcagacgggtgtgatcgagtcgaaaacatgagtcgagctggcggtcacagtttagcagatgggtaagcccaaatcgtcgtcctcaaagtcttgtatgtcctaggcgtgaggttgttgtaccgatgcaaataaattgtttgatgacggaggagacagaccttgcttggaaatctgaggaggaggactgagtggaacttgatcggatcactgcgtcagagtcgttcgagccatacgtcgagtcgttgtctgggctgttgagctcgagcgatgacggagtcgcaaggacaagataagcatatcgtccgcttcttcacaaagtcgaacatttcggcgtcgagactttggcaagctgttggcatggccccatgctaaaaatgacgaaaacggaggggttaggggttacgtcgtcccgatgtcccgaccctgggacgtccgatattctcgggattggccgcgtgtcccaaacctgggatacgtcctttgtccgcatgtcccacaactgggacgtcctgttactgttacggcgcgaacacccatctgcggacatcctcccctcggcccctcgaagccttctcacatttgtttcatgttacgggaagcgacgcggatccggcttctacgctaccggctttggctcgcgcgctctcgtcactctctctacgatcgacacaacgcatattcgatagcaccacccttagagaacaatagcgacatcgacggatctaagattatctttttatgataacgcatgaccattcctatgtacacgcacgcgtactagtatacactcagactcgctcgttgcctagcctgtcctacagaggcttttctgatcagtcgttagatcatgtacgagtacgccggccactttccttccaatccggcctgccaatatgccgagagttggatggtgcgcctgagcaatctcatctcctggtatcgccggtacctgctgtatctgctcgctcaccgttgctgatagcgaagctcatgcgaattccgagagtcaaccctcatcagggaattttggagatggctggcgcacggattgctagtcctatggtcctgagcgtaattatcgtctaatagtgctcaacagtctggagactgtaagaagcacagccacagcgatagagattaggaaaagatactcagatctttctattctccgagttataaggccgaacgctggcaatcacggcaattatctgcattttacgatgccctgtccgcaggtcgattgaccatttacgaaccgtggaatgacatatgaatgtgacttagatacatatttcgattcccgtccttatggacgggcgactctttctcgcgaccattcccccttcattatcggtggcttaccatgtctgaacccatccgatcggcgacggttttccgggaaactttgaaaaccagcattaccttttcgttgattctagacgtcgtaccaggcatccaaaagcaggagatcagcgtctccaccggtatcaactttctcgaacattgaggtaaggtgagggggccttccgcttcctctgttgggatgctcatactctcaactctttccgacacagacattcatagctttagcgaaacacgcatatatgtccctcgttttgcgacgcaggggagacctgtttatcgacgatcacaccattgtcgaagattgggcttagactatatggcattgcggtcgcggaatgtattaggagagagaagaggaataatgtcatatggatacgcctattagtaaactccgttagataaggtaggtaaacaagcgatatactcatatgcccaggaacactttcgcgctacgtcctcagtatggcctatagtgtcgaccaactttggtctcggattcggtcggaaactcgacggaatctcgacacaccgagtgctggcaccagtacagactctgggaatttgcttgatcgttgcggggctcctacagaggtttgtctggcacctcgctacgacgtatgcggtcacatagagtttgcagtgctttccggagtctttggtagtatcgcttgatcgctggtgccggctgtcttatcgcagctattccccgccgtacggtctcggttcgccttaccgtcggaactctcattgtacagactgcgtcaggccaaccggcgggtgcttctgtggcgggcgctgtactcaacaggtcgggcagttgattcgcttccaagaactcgctgaaggattacagatcgttggaggtctgtttgccgtttggacatggtatgctagttatgacggtctacacctcggtgtcaaagatcaaattgttggaaaagcagagtcgcatgatggcgaggcttgaatgtaaatgacattaggggttaggggttaggggcaacggtctcaaactaaagtagcgcgggccgaaccaagatcccacaggtcgatctcgactgaagggggtcttcctccatcaagagcagagggccggtcacctctattcgttacttagagccatattccttgaaggctgtgctatggcgagcgaccgaggctaagtagcaccttcgatggaaccatacggagctcaaaggagccctggtcgagtcgatcacatgtgtagatctcacttaatcactcggaaggctattctgatcacggatcacgaggcctcgacctaactccgtgcaaggttgggcgagtgaatgctcctcccttcataattcggatattggtcatctgaccctggctggcgacattcatatgacaattcgcacgatctgtacggaccgttctcgccaggccagcacgacagatccggatctcccccgtcgagggtctctggatcacatgtacactgccgaagatggcgctctgcgattctcccccgacccgcctgtactcgaggtggacgcggcgggtacttcaggcatcttggaatcaaggccagtgtaatctctccaggtcttggtcggtggtggtttcgcctgtgtcgatgcggcgttgatgactacgacgcgggggcaggggcaggaagacgatgagctcaatctcgaaagtctactgtcaatggctagaccacggccgtaccttcctgccattcggcttttgccacgtcttcctgttcctcttctgtcaacttggcggcttttcgtccgaaaaagacttctttccaggtgatcgtcttgccttccacgaattcatcctcgagatcttccatcccttccacgacgggcctgaccggtcttgctctctcacgcaatcccaccatctgtaactctctctccacctcttgctcgtccaccggtcgtccctcttccatggccgccttgtacttgtctaccaagttctcaagtaccgtcatctgcgcattcgtcctcgccatctcctccttggtatgcgtcctcacttgcatcaaatggaaagccagggaagtgagcgcggtccagtagatcaggaacgggatcaacggtcgcagtctttcggagatcggagggatgtcttctgggcctgggggagggacgtagaaggggttctgtcggagttgttgttcgtggggtgatggtcgtgtcgagagcgtccttcgagtcggtcttgtcgcatgtcggctacttgatgctcggggtgctgtgagagtgagaacgatcgtgagttgttgagggtcggcttgacgagagcgaccgagtgatccgactgaccagctgatctgaaagtaccaaacgcccagccgagtcgatgtaacgaggatgtaggattcatgccttgcgagtaattcttgttcgttttggccgcgatttgtgggtgatcaagtttgtacgttctggatatctttgcgtctgactctctgaagagtgccgaggtgccagctagcctgcaatatggcagtgtgtgagatgtgaggtatggtgttgatgaacatgttcgacttgatcgacttttggttcggatctcgtggttcacgacgagtcttggctcaactcgtctaggtagacgactactctctacttggagatcagttcatatcatcatcctcttcacgcgatcgccacaccatactcacatccaggtaacctcccacataccgtagagtttcttagatcgatcgccgatcatgtcagctggatactccgaggaagaacgtcaagcagcggcaagtcgatctgtcgctctcgacaagtaaagacttggactgattcgaattcgctttttcctcgatgatatccacagtgggcagccgtgagtgacctaatggacacctcgcagaacatacgtagacatgccgactcacgaacgatccttttgatagtactacgccgctcaggctgcaggcccatcggccacaccgacgtactacggatccgccggatacgcccccactgcaggaccctccacatcgactttcatctcgaattccaacagctacgacccggagatggcgcaacagtcgtccgcttacaactacaaccctgaagggagtggcgctgctggtgtgggtgcgagtgcgaccgctgggccctcagggactgccgtacccggtgccggggctgctgccggagggtctcagggttacatgggagcggatgggaaatgggttcacgggccgaaacctgccaaaaaggccgcgcaggggaagagggagacggtcatccgaagtaaaggagggcgggtctgggaggatcaaacattgttggagtgggacccatgtgagtctcgtccctcggctcagctctggcttcccacccccccagcgttgggaggccaaacagctgaccgcttgacgttcgatagcttggttccgtctcttcgtaggagacttgtccaacgatgtcaacgataacacgctcaacaacgctttcgccaagtaccctagctactgcaagtgtaaagtcgtccgcgatcgtttgagcatgaaggcgagtcccgcaaacatccccgtctgatcacgctcagaccccgcttaccccctcccttgtccctaccctcgctttcgacccgctcgtaggcacgctacggtttcatcgcattcagcgaccccgaggactacctcaaggcatggaaagagatggacgggaaatacgtggggaaccgtccgatccgtctgatgaagtgtaccgacaagtttggagggaccaaggccgtcaccgtcggagcgaggagggggaaagagttggacaagattcagaagaacaagggaaagccgttggatggacgaccggtgccttggtagatgcggattcgggtgccatcggtcacgcatggcgcgtttttttctttcgttcaggagcggtacatgatgtctattttctcgtgcaccggaccaatccaacaaataatgaagtattcagctctacgatttcgttcgctatgtcacctcatgaatgatattaagcccaaacgttcttttccgaagtgggtgtcacgagatttcgcactccggacaccagttattgagagccctacttcatgctcggctgtgtgtgccttgcacacacactacaatagggagggggtcaagagttcccctggggtgtgttctttgccgggagattgacttaggaagacccgtcgagttgaggcaatcaagacttgtaaacgaagccgctcttgtagaccgagtctaggtccgctgacatcgtcggcctcatcatccgcgaaacggaggtaatcttcggtgctgtcgttcatttcgaacccggtgtcggcttgttcggaagcttgggtgctcgaagcaagtgggtggtcgagccgaacctgcttcgcatcggcgatgtctctctcttcatccggagacaggcattgtttgctaggctgtggaaggggtacaggagcttggcgaggcgtaggtgatccttcttccatatcccttttgcagaccgcgcttcgaatcacttcgatcgaccctaggcctcgtaggcctctcaataagccttttttcgtgaccctatcggatccaaatcccgtcatcaggcgcattcaactctgtccgttccgatcgatttgtctcaatactcctgcctgcatagagaaatacaagtacaacaagaaccgtccccggggtccctgacagggcgagcgagaaatgacaagcatgctagtgacgatcccgtctcaaacaaccggttgttagtttcacgctgctccagacttcgggtctttcggacgaaagacaagcaagttcattaggacgcgaaatctgaggttgaccttgagcacacagctaaagcaatggctcagtcgaaactatctttgtgtgtttgagaaaccccccattggagccaaaggaagatgtttgaaacccggccccatttgaaaggatcccatgcgcaacgcgacttttgcgttacacaaactaagatgaatgtcgctaatgtcgcggctgcacgacaaggcatatatatcgggatatcagatggtcgttggcacttctatgaaacgaacagcctgtccgagattaagagaggactccaacacgctacaaatagaaaacgctgaagaaatgctcgcatcgattgcagtacttctcacctctatcgtatcagcttcggctatgcccatgcgtcgcgcagaccaatgtgcgattccggccactgtggggccacagccgatggctagatcggatcagaatacatcaactacagcgacctgggcaatcaggtttaatcaggactcgaattttctcattcaagagcaggcgcagaccaagtccagttttgtacgattacgttcgcactctcctaccatgcaaaggtttggctcaattgcgtttcgttacagctcgagactcgttccactaagctcggcatctacggttgcattgatatctgtaactcggtcacgggtacgtccaatttgccattagaggtatattcttgctcttatccttcgtgttgtactacaggctgtactgctgtcgggtggcaagaacttccccttggatcccaaagagaggacgatactcataactgcgacctgtacagcgcgcgacccgagaaaagctggtcgcgcgatgaaaccggacctcgaggcaaaacgtccatcgcgtacgagggaggttgcacggggcaacaaggtatgttacaacccgaccattgagaagttatgatgctgatagaacggatcaccaggacaaattgtaggacaatgctgcgaatacgccgccgagatttcgacgccgaaataggatcgaaatatggatgctggctctagttgcgtggtaaaaaccctaatttcgcctcgtcgtatgctcgattttctgatgccacggaacacatttgaaatgtgccgaatattcatgcctctattctaccgtgtctccaatctcctgatcccggcaccagtcagacttttccgccgatgcgcgtttgcgaggacttgccacttgagtgcagggctctcaggggctctcagaagctaatatgaaagatgttgtggatgcaatccgcatcggttcggtccaaatgagacccaaagttgtaacaaaattgcgcgcagaaaaccgtgaaacaagccagctggagaccctggtctagatacaataacgctatgagaatcgcaacgtcgaggcagcgccttgccagagtatgagtgaggcaaccagctcgcaagcgaaaattcaaaacaccactcaagtcacctctccttgtctctggggcttcaaaccagattgtaacaagatttcgactctacgactggcaccttcatgaatcgtttcatcctcgagtcactggcaggctctccttgcaatctctgtcgtgagaggagttttgctccaaaggaatgccacaggagacgcacaagaaagggctcgcgacctgggaagagatcggaaaattgcaaggtatatagtagcatagcagagatcccccaggagctattctcaggatggggaagagaaaatgactctttttcaattgctagggccgcgcttgattcacctatcttacaggaaattcgctcgatgttcttctcgatcgcctctctgctatctaccttgctagtcgcctcagcaagtccagtcaatcctttctgtgagagtaccccagccgagaatatactagtttcggatggaaacgccggaatgatgcgagactgggcggtctatgtcggttatgattccagcttcttgaccgtcaaggccgacgaggagcatgtgttcaaggtgggcaagatcgttgctcggcgagatcgacaatcttatggctcacgcatagcttgtagcttaataacactgatgttcccgatatgttcacgtgcatacaaaagtgcaacatgtacaagggtaagtctgaacgttctgaccgaaacagacgtcgcaattaatgtgctagtgaaacaatcagactgttcagccataggtttccaagaaaaacgaggcaatcctcacaattgtgatctgtacatgggacaacccaaagcgtggggcaaagccccgcaaaacactttgcaaggttggaccgccgttgcgatcgcaggtaattgcgggataggtccaggtaagcggtgttggtatgttcttcgccaaaaggactcttcaagctgacgaagccgtgcgactgttgtactttcagaaggatgctgcgagtatccgctcaagtattctactcccagttgatgcgttacgattgagctcaggtagaatacggctcgatctttttagcagcttcgattcgacgcgacgatcttgcgcattctatcaccttgccaagcaatatgcaatcgaagccctgcaccattcgatctcggcccctgtcaaactgcatcgtgtcgcgttcgtttacatgcccaacttcgaaagatcgtaatcgaatcccattgacctatcccctccgctatgtctcgtcctttgcatttcactagttcatatctgaaacctccttgacgaacaacctcggtgaccttctccatttgaacgccgaacatgacgatcggaagctaaaatgctcggaagctttctctttcggaccgaacaccgacctggtatgactcgaacttttgaatcactttcatgcatcgatgcgtatagctttcaacaacgtttcagtactgtctcttgcaatcttgctgcttagctagtagcaaacacgcggagatatagcactcaaagatccgtgcgcgccacaatggagccattgacggcaaaaaggctcgaggcccagctggaggaaggctcaatgaccatggccagcccggcgaatcgagatcggtcattggtgattatgagcgaggacgtgcgtggcagattattatcaggtggctgatgatgttctccaactatcagggctctgagcaagccaatctaccccaagcttggtaggctgttcagatcgagcgaatgcgcacggcgttcacaatcgctgagcctgtataccgtaggccgcttcacacgaagctttcccagactgcgcccttgttatatatcgcctgtatcgctggtcagtcgatctcgatgctcctgagaaagatcgcgctgaatgtatctagtatgtcccttcgatttggatattacagctgtcaatgcggtgtacgtaatcttgattcagcttttcaggcgagcgaagctaaactctcccgctaacctaccgctctccagctcgattggacccactgaagcggcaggcacaatctacttcgacgtcactggtacacaatacctcttgtccaatacggccctcttgatcggtatcgcgttcgctccgatggctttgaacccgctaagcgaactgctgggccgcgtcaagacctttggtatctcgatggcgctctacacattgcttttcattccacagaccttgaccaaatcgtttaccggattcgtcgtcagccggttactcatcggaatctttggtagtgtggctagcagtatgatcgccgggactcttgtcgacatgtatggcacgaagacgcgcggacgggccatgaacgcctttactctcagcatattcgtcggtcaaggtatcgggcccgcgatagcctccaatctggcggagaggactgattaccggtggatatggggggtaagcagtttatcctcaaatatgtaggcgacgttcgtatgctcaaacgtggtgatcctggtcaccagtatcaaggaatcgcttctgcggtcggaatggtctggtatttgagctctgcgaaggaaacgcgcccaagcctgtcgcgaatcgaaacagaggaaggatcgcgtttggagtacagccgatggcgctacttacggaatgctatcgctacatctgttatacggccgtttggtgcgtccgagtttttcgacacgcttcgacgagcggtatcacgggtggctagggcgctgacatttcgtgtgaaatagtgtaccttacgaccgaaccgatcgtgatcgctctgtctttatgggtcggtttcgcctggggagtgatcttcctgttcgccagcagtgtctttgtcgtattcggaacctacggattttcagtctcccaaagttctctttttctactgtaagccgacttgggatcatcgagggcgatatctcaagttctgacctctaagtcatagcccggttgcgatcggaggagcaattgcatcgctggcgagtcttcaccaggatcaaatctacgctaaagcgagtcggcaagccagtccagcgaaggcaccacccgaagcgagtatttgcctgtgattgtgtgactcgcatccaataataatactcactcgcctacatagactcgcttgtatcacccatgcgccggtggaatcatgcttgcggccggactctgggtttacgcctggacagcaaggccatcgatacactggatggtccctggtatagcccttgtcatcatcaacgccggcactttcaccatctatctgggcgtatagtacgtcattcggttgactcgccctgatctgtgacacgcgctcatccaaaccggtctctcaaagctcttatctttccgacgcatacgagcatttttctagcagtgctaacgcatcacaatcctttgttcgcaatgtcttgggagcggtgtttcccctattcgctcgcaaattggtgagtcatttccctagcgagtcgggaacgggactgctcgtttggggtgtcgccgttgtgggtttttgattggctcaggaaagtacgatacggcaacggcgaggagatgggatcaaaaactggtcatttcggattagttcgcccctcggcctgcacatcatcccgcaatcggatagagttcacatgattgtcaaccgcttacactcttgttgcgtctctgctgttctcagtacggagcgttgggccattctcaggcaggatccgtagtagccgcctttgcgacgatcttggcgagcgtcccgtttctgctcgtgcgatatggctcggttctgagggcgagaagcagggcttcgaccgagatacaggctttgctgaaatcgtaatccatacccgccattgcgcatgtaaaatcatcggtgattttgagcggacacactgctgacgacgtcagcgtcaatgacgaatttacaccgggctatcacacgtcgccagaacgaggtataatgtcatctacagtcgatcaaaagaagcgcaacatttgaacctctatgcgtggtatacctcgacccatctcacttgatcccatcgtgtgccttgtgcagatccgccaacttggccctatctttttccttttccttttccgcctgggttaataaccggcccttgacccgtttctcttccctctcgctataccggtcccctaggacctgcgcgtggggcaggaggagcacggtgaacttgacgagttcttcacatacgtcgaccaggcgatctcggttggaggaaggcatgagacggccggccggggtgaagcatttccaggccaatggaagggatgactgcgatgacacgccgtatgcgatcagcacgaggtcgtagtcgcttgcgagggtctcctgaattagcactgacctgatttgggatgacaaacatgcgcatccatcgtcccagattccgcaagaacgacaacgtgttgaaactctgcgatcctccgttgatctgcagaaaggtacgcgaatcaccgatgatgagcatactgatgtttgatgaccgaggtctcggcgtctagatcaagactcacctgacacagtccgaccgttcgcccttgcgttggtcgcacagaccctacggagagcggaatccaatcgactgtcgacgatcagaccatacatatcgactcgtcagcgcgggagaacgtccacacatggtatgcccaccgtcgtacgcactttgattcttgaatacggccgtcacgttcccatgctgttccggtgagcaccaaaactgtccatcgctccactcgctcaactgtctcagctcctggactttgggatgttgatgttgcgtatcatccttgacgggtaatccgagcgggtcgtacatcttgacatcgcatccgatgagatgtagaatccgggctgcttcgtaggccatcagtctagagaatgagctaaacgaacggttggaatagggtgatcagggtgtggggacggcgagggctatcacacggctgcgggtgggacgtaccgttctctcaagctaccgtagaggatcaagatcttcacccgtcttccttctggtagagtctgtaccatcctctttgtttcatccagctcgagcccttgaacccagtcctccttgtccaccgccaactccccatcgggtccacgttctgctcccgggattggacttttcaagaacggtcggtagacctcgtcgtcctctgcgatggccgggaagggattgacactggtcatgatggatcgtcgcacggttgttcgagtggacgattgtggtagtgctggtcgtccgagctgacgccgttgctgaatcgatcgagctaggttttggcgggaaaagacaaaggtcgactgggcgcggaaagtgatgaagcgagggggtgcgagtagtccaaaagtcgtcgtctgtgcagtgatggatcgtccgatcatctccctccagatcgtcgagtgagagctataccatcccccgttgtacgtgcatcaaagtatggagtgtctgttgcgagttggtgtttgaacatgccattttgatctgaatctcggaatctcgagacggaatccgttggatcgactagtccccgtcgtctgactgactagctcgcctgcctccacttgccacttatttctcacttggcaacctccactcatcgactcggaacccacgtttcatcgttcaccgtctatcgttcatcgtctatcgctcgtcgtcgtcgtcgtcgtcgtcgtcggcgatttggcagtaaataccgaatcccaaactcgcagcgtcgtggacacaatctaccacctccacatcgtgcagtgagacatgacgcaacaacgtgatatcgattcaatcagaatatatagatgttcaacaagaacaatatcgactacaggtaatctgatcccataaaacccaaaaaataaagagaggaaacacaagaatataaagggaaagaggcggatcccacgtccatccgtcccaagctgtccatatcgcgtgtacgcgcagagggggtccagccggaaaagatgctcgcaaagcccgacaacgtggttcccgtgtcgttacatgaaagcccaaaaagagagaaaggcggtgggccgagagtcgggtcgtttcgagagtaaaaatacacggggggtttctttttctttttgtattcgctttgcgctttggatttgtcgatcggattttgcccagagatggtctgcttggtcgtctttgcggtgacgaaaacgagtaccccgtgctgacgatgccgctacgggactcttttccggtcgaggccgacatgatgcgtatttggtcgtcgttgcgatccacgcagagagacgaagagctgcatttcgggtcgcagattcgacaagttgatttgtccggttacgatcgacccggtccggttccggggtttttcgtatctcgaccgagccggaacccgatgcggattgccccgatctgatatatggtggtgggttcgccgtggccgaggtcgttccttgtatgacggccagtgtccccgatgatagggtttgggagcgtataggttatgctaaaaaacagtgaatgattgtcgtttcgtgctggtcgggcgctccaggggtcgagatgaaaagtcgatgcgggaaaagtcgtggtcgttaaaaggaggggaaaaaggtcgaggtcgagatcgccctcttcgtgatgaccgcaggcccttgtccgcaaaggtttccgcggtgagagacgtggcccctgatgacggctggctcagagcgcaaactcttgactctcgaaaaactccatgtcttcttccaggtaatcggcgaggccgttgaccatctcctgcataaaggggttggtctcgtgtactctgtaggcgtccaggttggagtactacgatcgtgggcaaccgagaaggagaggagggcggggttagcgatcgtgggtccccatggtctgacattcgactcggacgctcacctcctgaaatagcctgatctcgcaggggttatccacgctgtaccatcaaacgagccagtcaaagtagacatcagcacgccgtcatcgagtcgtttgttctccacgatgatcgggtgccggactcactcgacggtcgcgcgaaaggtcaacaacccgggctcatgtgcctctgcccatttctttatccgctggatgactttgaacgtgagaaccgacctgatcagctgtcgatcgctctcccttcgtgtgtgatcgtgtgtagacttacggaacttgacttcatgaatccattccgacttgacggtcatgacgatatgcacgcacacgctcaggtctgcgtgatctggctcttgcctctcctcttcggcatcatacttggcctgcatgggagtggcacaatgtggctgctgcacctgcttctgcagaccgtgtagctgatgtagctgttgattgtgctgatgatgctgattgatcgcgttgaccatgttctgatgttgattgaactggttgctgtaggggagttgaccctgaggaagagggtttcgggagtagggttgagatcggacgacggtggtcatcctggcgaggtgtgcgacgtgttcggcgtggaagtggtgatttatgtcgaacaaaaggcgttcgaatcgaatttgtgttgatttgtgtgaggtggaaagtcgcgttggtacgtggacgttgttttatcgagcaaagacacactactagcgaagtacactatctctgcaagtcgactcgtctcgtcggaagtggtatgggtatatgttctcgtccggttctatgaaaacggtggcgaggatacataagccggaagatacaagttcaatttagtgctcaattaacggtatcaacggggggtattccgatgtgcatgatcctttgcgaccaaagctcgagatcgtccatcgttccctagcaaaattgctagttatcgtccccgcccacccccctcgatctcggtcagatttcactcgatatcgcccctcttgccttgtacaccgagtcccggtctggcccccggaacttgattacttccggagtcgatcgtcgacctcgaacgaaagatatccgcgtcgttcggtcatcgcgtaagatgccgtgatacatcttcggcgtgcctttttcccctgcgtttcccgccttcaccctcgatcacttggctccctctcgcgtgtttgtctacgatccacggaggcgcacgtcggagatcggtcgtgtgcccgcagttcggaacttttttgctgacaaggcgggggcgcggcgcggacatgctggttaaaaaacgccctgtggctgttaagtggttgcttgtcaccgatcaccgatcaccaacaggaatgtcatgaatcgacagaaaggcagcagcgggccatgccgagccatggaattacccccgagaacccaccctcggttaggaaaactcacgatcctcccccgtcgaaaccatagatcggccactttcagggagccaacctccacccccgatatgttgacgccccgacgtttgcgacttatcaatcgttggaactcaatgcgatcgacattgtcgttcggcgctgatcgcccagacctattgacgggcgctaggttaatatgtttccagcgtggtgatcacattctagtcgcgctcgatttattccgcaatccggtgcggatcatcgatgaggttccagcgatgcatggacccgtctgaccgacatcgaccggcattgtttggaaacgggcccatgtcagcggcaagatacaggtccacaacgacgtccgtctggcaggcgcgttcgaaggatggatctccgctcggtttcctagaacatcaacaagcagcaagtgtccggcagaagaggtccacaaacagcccctccactctcgcgttcatccacggtacctttccccactcatgcgcgcagcattattttatcaaccttttgcattctgtacgatcccaccccacgtattcatgtgtcggcgcgggcatcgtctcgactacaatttcgactgttgctcagacaccgacttcttcgaatcggaccgcttgctatctccctttgattgtcaaaactcgatcgactgggagatgacgggcgggacctccaaccattctttggcgtgtttgctcagttcctggaaaggttctcccttgaggtgcgcgtcaaaggcttctttccccgagtactaccaaaggggggagcgaatacgagcggtggtggtcggtttcaagtccggtgtcggtgacgggcaggcgatgagggtatcaagaggtcagcgatcagggaccgtcttcgacgagggacagtcctgcgttcggtcacgtccttcacgccggggtcaggcgggacgagatccccccgttcgtctacccgaggggcggcccgcgtcggaatcaaccaacccataattctccgatctacatcttgcggcgtcgctcatcatccgctacgcgaagatcatgatctagaggtggcaaggtgtgattttcgtctgttggcgtcttttcgaccactcgcgctcgcgaggatgggtttggcgccggtcgagatgtctcgcggagatgggtgacgatcgacggacgagaacggagcgggagcgggggggggatgtgaacacctccgaccagggacattgaaagcccggtgggcctgccctagacccgcgatccttgaggtcgtctctcgattgaaccccttgtcatatctggctgccatcactatcgtctccgtctcgtcagactcgccgagggtaacgccggggtcgtcccagccctttccccttgaagtgaaggactcgagctcggacttgtcgagtctgccccgtgaccagccctgtcttgaacgaccttgccactcgtcgcaaagctccactttgaccctacgcttcgactttcaacattcgaccgtccgactcgtggactcacctcttcaaagatctcgatcttcctcccgttatccttacttatcgacgtcctgtagaccagggtcccctcctcttggttcaaagcgtattccctgatcttgaccaaagctgcggagtagaacagggttggtcagggcagtgcgaggaaagaagaatgaatagaagcaacacatgtttcgaccggcgcgactcaccctccttgaccttgtcaaagtgctcggctttggcgatgacgctggcgtgaacgatgatatgaccgggagacatcttgatggcgattgggggtcgaggtgatgatgctggtgaaagagttgagagggttagtgggttccgtcttgtcgttgtctgtagtgtaattggctatacttggttgatatcgtcggggtgtatcgccggttgaccgggtatgacaaagacgttcagcgatcaacgatgagcgaccagccaaaaggcgggttcgtcatcagaaataggggggatgtttcgattatttgggtcgaaatgtccctatccgcggtgcaacatcaagtaaatgcgcgtctgatcgatcaggtcggggggtcgctgaacgaggtttcatttctagcgatttctactggctttgctgatgcaagacgacgatgcgattaccacagctcgacgccgttcgttcaaacaatcaatcgcattcaagtatggcttcagatcacaggcgatcactggccaaccagttgctcaacagagtactgtgattcagtgatccgatgatatactttgtgagatgagcgaatgaaggagcgggatagatgatcgatgatgacgtggcggtggcaattaaatgacggcatcatcttaattacacgtcgccccctcattcgcccgttttctcattcgatcgacctttgctgcttgacatcatcgctcacttcgatctcgtcacagagtgtgacaacctgcaaccaccatcttgtcaatcccatcaatcatcaccatcgtccaacatccacacgacagctaaatcctcacacctcataaacacccaggagaaccagcttctacagtcgaaactatttcgtgagcctacaccgcgacgacgaccgaaactcgggccggacgaaatcgctgacgaaccgcttttcatcccccaccctccaccgaccttttcagaaccatgttcacccgaaccctccgccctctcgcccggaccttgcctaccgtccgatccatctcatcgtcgacctcgagctcgaccgccgctacttcctctcgaagaaacctctacctctccaccctcgccgctacggtcggattggcgacgtatgggtactcgagcgtcgtcagcgagcgaaacctcgtcaggaacgacgtgacggggtcgggcaactttgattcgggcaaacagcagtataacgaggacctcaaggtcaacaggcacaagagtgagtcgagcgtatgcgagtcggggggtgtctatccgtatagacctggggcgagtgactgatcattcccttgcgcccacgcccacgccgtagtcgccgctcagtacggagccaccccagagacccctattcacaacaccaagacttcttccaaatcacaccacgtcggtacttccaaggtggacgccgagggccataacatccgtcgtggggatggattgcaggaggatgccgtccccgggttggtcaaggacaaggcggacgaggctcaagagcagagcgggcagagcgcttataacgaggagaccggggagatcaactgggattgtcctgtgagttccgagttccgagtttgcggtcatgttgatcgttatgtaccgtcttgctcatctgcactcctaaatactcacatccgactctactcgactcgactcgacccgactcattctgtcgcagtgcctcggcgggatggcccagggtccctgtggggaagacttcaaggccgccttttcctgtttcgtccactctgagcaggaacccaagggtgtcgactgtgtagaaaagttcaaggccatgcaggattgtttccgaaaacaccccgacgtctatggagaaggtgagtcgcgtgaccctcccctcccactcccccgacactttgaacgtcgtgggttcctacaagcaatatcgatcgatcgactgacccaacctggcctgaccccgctcgacccgccgattagagatcgaggaggacgagcctgttggtcagccgacctcgactgacggtcctggacctctttctgcggcgaccgtctcgggttctcctttgcccaaggaccacccggaggccaagaacgtgcccaagcctcctaccgacaaccaccccgatattccccagaggacggatacccacctgaacaaccccgccaagggtgagtgctgacggcgtcatgtgacagcagggttcggtcgagctgatgaagcgtgtcgtcgtcgtaacctcgtttccccacaggtgttgccaagctccagcctagggagaaccgagcggacaagaagggcaaaggtgccggtgacggtaccatctagagctgccgcacgcgaatctgcgtccccgctccaccgtaccgagtggggaagaaaaaaggaaatcaacgaagcgacattcgaattgtaaacccatcactaccattcatattctgactgaagaagaggcactacgacgacgacgacgacctgtgtccactactgacagccaagtgaatatgttgatgtttttgtttccgcacaactcgttttgcttccgctcgaggtgaacgtcgactgttcggtgggatagtcgtccatgcaatatgtcgaacagtagtggggtagagcaattggatcataggtcatgccatgtcttaactgctcgaccactggttagagagccagcttgacattccagtctgtatagccaaggatgaccgtctgattggtcgtcggatcagccgcatctcaacaaactaccagccacagacctcaccatgatacctccgagctcgacctcgacctcgacctcgacgccaagccagatcgcatcttcccccaataccccgccgcttctcctagcccaggccaacatatgtatcaagacgaaccggacattccgtgaacgctcgaacgaggtcgaacagctgcggaaacgatgtaccgctgcgacgcaagaaaagggcgtcgtcgatcaatggaacgacggggtcaagcggggggtcaaagcgtggatcgacgacatcgaggtgtcctggaggtgtctcagagtgagtaccttctccccgacttctcttccagacctcgatggccgtactaaacctgctgacacggctcggatagcgagcggtttgggatcaagaaaaggctttcaagctggtgatggattccctcgacgtcattctcagcaacgacctcttgatccctcggatccccaacgacgtctacccgccttcctccggatctcctccgctgttcaccattctcccttacccacaatataccgacccgctggatcgaccgatcgccgtattgagcctccgatccctgcgtaaagaacctaccaaagagggcaaagacaagatcaagtcctgggcgtggtggtgtgccgagatgacccggaggtgcttgaacgaggtcgacaagatccgacgggcccgtggggatgtgggcgaacaacagcgtgtgacggggtgtgtgatgatggtggacttcaagaacgccgggttcaagaacatcgtgagttccgatcgccgtcgttattgacgtccatcaaaacggtggaacggccctcacacagctgcattccccgctcttaaacaggatctggatatcgtcccacacttgctggccatcttgcaaaccacgtacccgggtttgttcagtaccatctacctcacaaaccattcgtggacccatgcctcgctgtggaccgtcgtcaaacgtctcgtcccgaaatccgtactcgaccgggtccgtttcctcgaaaaaggtgaactcgagcaggtcatgcagctggaaaagatcccactcggcctgaacggcaagaacacgtacgacgttgccgagcatccggatgaagcgatcgcgaggtattcttttcgtgattgggaatcgcccgccgacccgtcctcgcgcgagaccctcatctcgactttgcgaggattggacgattcccatcaagatgtacaggataggatggtccgtcggaaaccgagcttgggggtgatcgccccgacgcccgtcagcgagaggagcgaagaagacggcagcgattcggaagaagagagcgataccgctcttcaagtcgatcgcatgcgcgggttcgagcttcacctctctccggatcgggtcaaacgcccatcgttttcgtccagctcgagctcgaccaaggtcgccgaccaagcgtctggatcgttgcaccgctttccgagctcgtcccgatcgtccacgggggaatcacctaagatccccatcagacccgctcgatggccgagattgtcgttcgacgccgcgagcgagcggacgtactcggcttcactgcaggaacatcattcgaggagacttagcgagaccagggtcgcggcagagaagattcgagcaaaggaactgcttctcaaagaaatgcgggccaacgaatatgggcacgataccgagggcgacagcgacatgccgaatcgtcgaaaaaagcgattcacgatcggaccagcagtgcgttcgaggagcgtcgacgagacggtcctacaagccgcacggctagaaaatccggcacggaagactggactggccatctctgcctacgacaagatgaaaaaccccatgtttgggtacccggccatgagcgttcctgacggtgccgctgaggccatcagtatacgtgcacagaagccgggcatgtcaacaccgtcgtcaaccgcgccccaaataggcgtcatgtacccgtcgcaacctagtcagaccatcatcccgctgcacggacggcgccgcaagcgagatctcgccaagactctgttcttgctcggcatccttcgaatcgtcgggttgcgtgactggttcgtcagctttaccagcgaggtcgggcgacttttttggggtctacttttcctgcgtcgctggttcagcagcatgagtgatgcggaagctctagggagaggtcgatcgggcatgtacgctcgaggacggagagacgtccccctgacaccgacatcaggcttgacaaagcagctcgagatgacaggcgggtcaccaactgtaaagagaggaaacgtcctggtctcgcaagatgactggacatggctgttccttagtctgctcgtagtacgagacggctggggcaggatcttcatcaatgcatgggaaacgacaagaaaagggtttctagcagccgttggcaagtctcgtcggtgaatcagccgatcgtcgtttgctccgatggaaggggcggttctgatctatagcatggttgcgtagagacatattgttgtacagacaggtgatacccagatcgtaattgtaacagattgagagcgagaggcgaacgtattatatccggagatcttcggctcccttgcgtgcctcttcgacagcatcaccatccttcacgctgatcgtcgcctccatatcctgcttctcgacagtgtcaccgtcaacctcttcttccttgatctcgggcttgtcgttcgaggtggtggtctgctcgggctcctcaaagccttcgtctccagtgagctttccaaggtatccctcgatccaacccgaaacttcttctcgtccttccccagcccacatggactcgtcaaaagcgtcacgaccggcaccgttcttttgctgtagagaccggttgaaaaggtggtcagctcggcgctctttttcagcgcccgcgctctgaaacacgacttacctcgagcattggtagaccaccaccctgctcctctggaagctgagccaagagcttggtacattcgacctgattattcaagatggcccagtgcaagggaggcgacttgttgtcgttgacagccatgagaagggaggaagggacgcgctgcaacaagtattgcaaaacgtctgacgaacgggcaaggctcagcgaagctgagatagtatgctgacgttgccaccaccgatcgactcaccggtgtgaccgttcccgcagcacatgtggatgacattattgcctcgatcatctcgagcggtcttcaaaggctcgtctccatactgctcgacgaacgcttggacatcttccaaatcgccataccggcacgaaaggaggacttcctcgatctcctcgggagttgggcttttcttgacctcggtcatgatggctttgtctagaattactatctggaaatgagacgaaagagctttcgaacctcggtggtgaccaaaatcaacatcgcaatcgcatcggtcgaaaatccgttgaactgagattccacggaagtgaattacgtaaaatacttccggccatctagtttacaatcaaaaggcgtctcgtttgcaccgtagcattacaagaggtatatcgaaatgttcgtccgggtcattggtcagtcgttaggtacctctgcatcaaccttggctaggttcaactctcctcctctttgatccagcagcgactgctctcccgatcttcgagtccataaaggtccagttgggatcacgatcggtgatgaaggggtgtcgcagcagttcctcggcgaccggtcgatcccttgggctcggcgcaaagcactttttgttcaaaaagtcatccgcgacaggcgaaagggtgacatcatccggaacaggtggagctgcacgtgtgttggcgagctatttgggagttgagggtgacagtcaaatcggtgtgacgcaagtatgcaaaagccttgaccggacaatctcacctgaaacattgcagccaaggcctccatgtctccccaaggtcgtcggccagcccacatttccaggactacacatccaagactccaaatatcaaccttggccgagtatccttgtcccttgaccgaatgcaccacttcaggcgccatccaaaacactgagcccttcaagttggtcgagatgatcgagtcgtatgcgtcatctgtccacaaaatcagctcagatgatatgcctacacaaggacaggatatagcaatactcacttgtcctcttgctaataccgaaatcggagattttacaagtcccgttgtggtcgaccagaatgttgtcggcttttaaatcctgttgtggagattccgttagtctcgctttgacatctcactaaagataccgttgacgaacccgatggagaatgttcaaggaatgtagataggcgagtccgtccaatatctgcatcgtgaaagacttgataacctgctcctcgaactttttgtgacggcgatacacggaagccacagaaccgccgggaacgtattccaagaaactgaagcacgcaacaggggatcagccggggatatgccaatcgagcttgtagtgactcacatggaaagaaactcgggcgattcctcccagccgagataagctactacttgcgggtggtcgagatctttgagcaaggcaatctccgatttcaaggcctcgatcattccggtctgtctggcgtcctctcgttcagtgtcggtccgaggcatctcgacctgcttgaccgcaatcatatctccggtcgtggcattcaaagcgagatagactcgaccgtatgtgcccttcccgatgagatctcccttcacccacgtcatggtgactgcgaaacggcgagatcagtaacgcgatgacattgcagcggacatgcgaggcacttaccgggtccgccatcaggcacgacctcctcgatcggagcagggggcaatttgccctcttcaatacccgcgggggtgacttcgattaccttgtgaccccacatgctggatgatcgcttgcgctggagggatgatccttgttgcttgactgccggcgcgatcttgctaaggtgcttctttcgaccctcggcgacgaatctgatcgacttccgtgcgtctgccttgttgaaacctggttgacgctgaggcttgggtactggcgtttgaatggtctcagtcggctgcggaatcatgtcgggtagaccctccagaccagctgcctgaaccactggtttgtcgaggtcgatcttgggaaaaaattcttccaagcgttcgtagacgtcttctgcaggaggacgaaagttccattgatctttcgtctttgcgaacgactttgctcggcgtaagttggcaccacctccttctggggcgatttccgattcggtcgtggcagctgtaggcagatccgagctcgagtttgagttgggatgaccagacgtgggcgagatgcctgggcgggctgttgccgtgtcaaccgtgagagacggtttgatagtagcatcgttcttcgatggtggagcggtaccattgtccttgccgagcggtacaaagaacagagtctcttccgcttcgtcttcttcttcgggcgggctggcggccggtcttcgcggcagaagcgtattctcattctgcccatcaatcatggcattgagctgttccgtccactgattggctctagctgtattaccagaatcgtcctcttcttgatctcgcagtctatatgcgtctggctggagggttgcttcggatgccctcgaagagacctcactgaggctcgagtacggctgcgcagatgcagcagccgatcctggagacagatgcataccgtctccagttggtggtatctcgcgataggctgcgatgccttgtccaaagctcgccctccgactatgagacgcgcttgatggactgggtatctgagcagcgctttcagatcctcgcctatccatgcgtgagggagttgcaggatggggttccggaaacgccagcgccgggattgcatgctgctgcgggccaccatacgttcgagctccctctgccgaacggatgcgtgcgaggtcattcctgtaaaatggatcgggatcgaggggagggtgcgaagaaggatgccgtccaagactgcgcgcatcagcgtaatagctgccttggtcaaagctcgattgtgcagatgcgcttcgattgatattcgcatacgagcgattcgtccggagggcttgagacacttgaggtacagggccgctgtgattgtgataagcgtgctcgcgtcgatcccggtaagccggctcgacctgatatccataggtagcgccaggcggaagctgcgcttgtaaaccgtcgtatgccccaaagggatcgtcggggtccgcaggcggtgtggagagatatgcgtctcgctgaggcggcgaaacatagttgggcatcggtacattctccattcgcgagccctgcatgggcaccggccgagaatgcaaagtggatgccgaacctggaccaaaggggtgatcatagcggttttctagggggctagcgttcgtttgaccgttcaacggacctagatcctcgctcgcaaagctcgacatgccagcattccacatgcccgccttgttctcccactgaagccgtcttgcctttcgctcccggccgacttgacgctccctctctttctccaaagcttcggcctcgcgtttctgccgctcgacgcgttccctgtcattctcgacgaagcgcctttctcgttcttcagctcgctccgcagcgatacgatccgcctcgacttgcctctgacgggcttcctgttctcgagcctgcatcgcctcccaagcagcgtgctccttttgttgttcttgcatcgcaacccgcatgtctgcttccatctggacacgcttttgtctttctctctcgtcttcttcctgctgcatccgttgtatcagggccatatcagcctcggtaggctcgctgggcgacggttcccaatccaccgcatcatactggttgtcgaaaggtggaacaacctcgatgcccgcctcgggactgtccatttgctgtcgaatttgaaagttctcgtagttgttgggcagacttgggcgatgcagagaccccgccagcctggggtcgcccttgtctcctgctccccatcccgacatcggggcggtgttacctcggcgagacgtgttctgcatcatctccgacctcgatcccatagccgtcgcgaccgaagttgaggcagaagtgtgcgtgttggatgcggaatccaaggaaggaggaggggagccatacatcctgctagaccccccgaccttgcttcgctcgtctgccggactttgagaacctttgctcgtgcttgtacttggcattctccgacgggacatcaatcgatgactattgcgggtaagtgcatggcctcctccactaccaccacccgcactgccagatgcgctggctccactcatgcccggaccgccgtacggctgagtggtgtccacggggctagtgtcgtatccgacgtcctgagcgtagccatgttcgtgccgaccaaacttttcgctcgtactcgagacgctgcccgactttgaatgtctgcttccacctccaccgccgccgctggcagcgtgaccagctcgaaccctctctgctcctgcaccgctggctgaactagcgctgaacgtctttcgcgacaattctgctgggctacctagcgtgtaagctggaacactaggaggtcctccgtgcacaagactgtggccggttgggggaggaatagccgcgctcgaaggggatggtgccatacttgtctgcatgaccaggaacttgagagatcccttggcgtctccgtgattcttgcacagctcaaagagctgtgccctcccgaccgaatcgctctcgggcgtctctccgatatccgttcggtatagcgtcaggctcggataatcatcgtcccggaagcgtagctgcgagttattcagtcacgtcagtttggtccttctaatgcctgtctttcaaggattcactcactttcgcaaaaactctttccatgatcgcctcggcgctcgccattccactaacgtccacgaccgaaaagttttcattgtctacggtgactgccaacctgatgctccccaacctctgtgggttctgcgccaccacggaagatgtttggggcgtcgagccgaccgtagcctgttgtttaggtcgaggtgggagcataggcaatccctcatgccgcctcctgtgtgcagtctcagctgccatgttcgatccagtatgaccagcgtgtaaaggcagagtgacgctcgatccggcatatgccatgctgggcgatgaaggcgaggaagtgttgacaggtgatcccccgatactgcctgccatcgtcttttgcgccatcgcttggtacgcctgctgttgtccttgttgctgctgaggtgcgggcgcgcccgaagggatgtcgtttggtctcgccgtagccaccgaattaggtggcaaagggatcgggtacgccggcggggtgtgaatgcgaggcaaggacctttccactgccggatgcctattcggcctcacgttcgaggcggtcatcattaccggccagtttgactgggcaatcgggtgattgttgttgagctggctcgaaggagatggaccttgagagcctgatgaaccggggcgattgactggaggagcaggtggataggcggaagaaccggcaggtggcggggaagcgttgctccggtatcgcatacccgtcgaatcgtcaatcgaggtccgcggccgatcattgctcccactggtcgtgtacgaagcgggcgaagagccatctgccggacgctgttgcatcatggtggaaccctgctgtatattcggcataccgcttatcccgggcgtaggaggctgagcagtgatcgtgaccccttgtccttgctggtgctgttgtaccaccttgtttgaagcatgcacggtcgtctgtgccgtccgccgttcttcttctgaggaatcctcgtcgctatccggattagccacgatcagattcaagttgggcggaggccgtcgggctctcagcgaacccatggtccgaggtccttgcggaccttgcgaggtcaccggagatcgtcgagtagacatggtggctgacctggtccctttgcgtcgaagacgaaccccgtgtcaatgtcggatgaatgggagagacaaggggacgagcggttgtcgtctccagagacagggggttgaccggggtaaagatggatgtccacaatcccgcgccagcaagctcgggatatttccgcagagcccaacgagatctttcccggccaaagagttcctctcagccttgattgtcgtgtacttgcgaggacgtggtatcaagagatatctcaaagggatcgttccgctactatcgacgtcacgagcgggatacgagcgagagagcgtgtgatttcacccttgcttgaccaggatagacaaggttcaaccgagaaagtcgggacctccttggcctctggtccttttccctttgacgcttgaccttgttgaagcacgatcagaagctcatttgaccccctgagagctgaatgagatgcgacacgctttcgcctttctttgaatcggcgttgcgtccggcacgcgatgactttggtcgtgtggcaagcgatctcggaagctggaacagtacaccagaccacacactagttctaaatctagcttggtcactcttgaactatgtgactcgaatacgtgggagtatgaccatccgtcaaaggtccgactgtcatgtctgatgatggtcgagggtcattctgggcccgaagttggccgaaggagatgattcggatgcaaaattgactccggtggtgtccgacgcgacctcgtagtcagactacggccgaaccgccgcagcgatttcttgacttgaatgatgtcgagaccgatattcgcaacgatcgcagtcggctccgagtgtgacactgggcaggtgtatatgtccgggatggtggttcctggcgaggcaggaatgtcattccgccaactggaggatcagcttgtgtcttgatggtatcaccagtgccaatgaggcatgtctgcgacgctgccaataggtctggcgcatcgattcgcccgagtaaaatcacttttcaaggtctgtacgtttgaatctgcgcacctgagctgccgtgatgatatactagcgattacactcagtttcagaatcagtgtgacattacgaagcgaaagtcaattgcctgccgttttgaaagatatcctagacctgatcaggcaactggtccagattgtatgcacgccagagttggacgttttgatcaagttaaatcgctaggcgcattttacaaggccttggacaggccagagggacagattacccggaaagtcatcttccttgtgatcgtgaccctttcaagcaagggtatatcgatcccgcgcgacacatcacaagcgcacaaacctgtatctatgatcaaacggggtaacacaagtggaagaggttccggcggctagaagatttggaggccaaagttcaatgtcgccagtgtcactcattttgtcctggagagcagcgtcaccgagaggtccgtcaaacgaagacactcaccggcaagtccttcataatccaccagatcattcgttcctcgacaagattttcgctactcccaggcggtccgccgacaagacgttcccgctgggcgacattccgcgtatcatctgaaatggttgagcgggacgataatctctttcgagcatacgaacgatcggacatcctgattgtcatgtcacacgatgcgacaaggcggataagggcccctgatcgagtcaccagttcagcagtgtcgaccgctgaatctcctgctcagtggtaccagggaagaatcgattagaaccgcaacgatgtgatgtgcgatgaacgagagtgcgtgaattgattgatgaatctagaaccttctcaacccttgtggtcgagtccgtttttaactagcacccgccccgtcgatgccgtctcgcttgcgcgcgaatcacgggtttcatgtttacgtgtcgcatccttttcttacccctgacgacgcggcatcctctaccgcgagcgaccgaggattgataggcgggagccgggatgtttcatcttctcgcctgcatcgaaaggcaccgaacggtggcggaaggacgacagcgagatgacacgtgtgatcagaatagagagatcggtcgattcccggcctttgatctggatgagctgttatcaatgcgatctgatataaggggtcggccatcgattatgtaggacgaatcgcgctctcgtcccgaatgggtttgccatcatcataaaacacaattctttcactgactgtattctcgtcaattatccctagaagggacttaccctccaccttcctttgtgttcaaggggcgcccaagtgactgggatcggagaggaattcacggaacaggctggccctgctatattacccactagaccgtgggtattacgcacgctggaaggaaccccttcgtcaagacatctgtctgcggaatcgtatttcgctgcattccgagtctcgccatggtatacatttgttgggtgttcgtcgtggcggtgttgggcttggtccaagcgtatgtcccgagacatgtcctgcttcaacctcgtttcttctgctaatgcgatctctctcatcaatagggctgagcctcatgccggaccgaaacttatggatcggtcagaaatatgcttggggagctggtcagatagaaaatgcctcggcatcacgattggcaagttttcgtctgggagaccaagcggctcgcttgctgatgcgatcgtgaacaggcgtgtttggaggagctggcctgattctgctttgtgtgcccatctacctgatcacggtgcattacagacgagaacggaagctcaaacgaaagatggccaccatcgagcaggagaaagccgatgaaaccgccaaggtggagaaactcgctgcggaatccccgaacaagctcacaccagcccagaaactagcttttgaaggcaagaaggcatggagggacagcatgtccagcacatcagcgccgagttggagtttcgccacgctgaacaggttggaaggtggaagcaccagcgcggggtcttcgctgcggggcagtatcactcctcgcacgcagatcgtgtggcggccaggaggttaaagggacgatcttcctcggcctcggctttggaccactttcagcaacagcaccacaagctcactcctccccgtagcccagtctcaagcccgtccccaacctcgacccactcttctcgtatgtccctgatcggaagcgagaccagggttgtcaactcggggttcatcgtcactcgacctcgatccggatcgagttccgatttagaaccctcgagaccccgttcgggttcgagttcggcctcccctgtcgaccctgttctgatgcgaaccagcgttggtccatcgtggcatcaaaagaggatgcaacgtatggtctcgagcggtagtcttgacaagctcgccagtctcgagttctcttcgcgcgaggctagataggcatagatttcacgttttataaaaggacaattagccacggacaattccatacaagtcgttcgttctctcatcattgtcgttatttccattctttgtagccaaaaaagataatcggtgtctatcgtcgagctctcggcccggtcgggtcgtcagtgaagaacgcgatcgactggatgtggggttcacgttagcgattgtgagcgaggtccaggcggattacaggctgacctgttcgtcgaggtatttcctcaaatccttcttccatccaatcgccgtgatccccttttccgagcccatgctgatcagctcgtcgaaaggcaagggctatagcacgatcgtgagcggaaagtaccgtctgcgtgctttgagctcttgactgacctcgtatcgtaataatctcgaatagatatcgttatcgtcaacgagcatgccctgaaagacttgataaagctcttccaccgtcatcggaggcggtttgatcaccttttccttcttttttcgggtcttgggggcgacgtcttgctccgccaagggaatttcttctgacgaggcgctcggtgcaggagaagccgtccttgctttcgtagtctttcgcctcgccgcagttacaggggtctttttcgccttggctgccgccttgcttgccttgaccggggccttcgaaggattgagcgcgatccagcattgctcgagctgacggatcattgttgccttgactttgctcttgcggaatccgtaacgggccacggctttctgatgagcgtgtcacgcatccgacatcagcaaggacgtcacgttcctgatctgtcgctccggtgcctacctgtaaaacatccaggtccatttccccaaaatttggcatccccctcgcctgtctgtccgccgtggtttcagtgccgatagttgccacctgcacaacagggacttccagcacctccacctcctcttcagactcttccgattcttccagctcgaaatcttccgccgaactgtctgccgcaaagctaccgggctcaaactcgaggataccttctcctccgaccatgtcttgcggatcgtaatccaattcttccagatccggcgctggaccaggcgacaccggtaggctcggaggcaagtcgacaacgtctgtgcggcgagttggcgatggcgaccaatgcaagtgcgctccgtctccccagtaatcgtcttctaaatcgatcacatcgatccccgcttcgaattccgctcttccagggggcgaaaccgatcgatctacattgaaagactggaatcgctcagatacgccagtggcagactctttggatcgcacagagtcgttcttcgtggaatcggcagcgttgtcgacggatctcttgcgtttcctcccagacgacgagacgcttctcgtactgtcctttcgttgcaaggtctctcttggaagggcaagcgacctgtctgacgtctctgtcgtagtcgcctggctgaccgacctgggctccctcttgcatacgatcatatcgaacccgtccgatgaagccctctcggacccctcgtcctgtaccgtcgtatcgtcaatctcgatgacctcggattcgctcggtgaggagaactgatcaagctccggacgcgtcccagagcctactctctccgccgccccgccccgcaaggagagagcttcgaaaccctccaagcctcgacgactcgtcgtccccgacatcgactcgcctcctctttcgctgtctatcgaattcttccggttgcgaatcgagctcgtcctcttcaatctccgctgactgttggttttttcccccgaaagacgatccgccagatcgaccgtcttccgtccctggaaagggctggtcgctcgacgagacgttcgtcccgccaacttgatcccagagggatcgattaccgccagagactctagccgcgagtagagattcggtaaacccttgcgtcaaaggagctcccgggctgctcatcctgtccatatcaatcgatttcccgcgttcctcctcgtgtttcatcctccccgaatcgacattttccttttcatccccccaccctgcctcgccaaagtaatcggcgtaattctgttcaatctccctctccagcgtcttgccgtttgacccctggatgtgcgccgggatgaccctgacgtccttgggcagacctgcgagggctttcctcttgacgcgtttcttctcggggatggggacgaccaagtgtccatggtgatcgtacctcttgaccacctgaccatgcgcgaccgtctccaacaaggtcgcttgggtggacggacaggggttatcgtaatggcgagaaatcttggcgagggcggaattgatgagtgattcgatccgagccaacggtagaggaccaggttcctcgggcgagtcggtacattcgatcatgtgtttctagatacacgcgatccgatcgagtgatcgcctcgcaatcagccccccgagatacccgcttgtgtgagcgaattgacgaaaaccttcttacccatttcgttttcaacatcctcctcggttcccatttcaccccgcagacgacgcattcatcgagttccttcatcaagatctctgtcactggatattccggcagctcgactctttcctttttcaccttttccttcttgacccttccgttacctctagacattgtcttcttcccggggacggattccccgacttggtcagtgcctgtctctgccgaggatctggtagaggtagacgcttcgggttgttgtggtatgacgctcttcaggaacttgtccatgcttccgggactaggcattccggatttcgacctactggcctgatccgccaagtcagagcgggaagtcacagccctcggtactacggtatcgatcgccatggcgggagaagccgtgccggaagtacgtcccggtttcgtgtagcggtactcatcgaggttcaacttttgaactccgacatactcgatgtccagttcggccttgacaatctcgatatcggggctgctaccggcgggaagatcatatggctcgacgagttgccctgagaccgaggtcgagccgacagtgattgtccgggaatccgacggtttttccgggggtgctgtggtcaagctcttcttctgttcgtgctgttgggcttcctcgtgttcttcagcgatccgctcgggctcggaatcggagacgatattatcccgattatccacctcgacgcttgtttgtttcgccttgacggtcggctttttagctttcggcttgacatccaccgcctgttccttcttcttgttcttcttactcttgtcgatcactttctgttcctcgtgtttcttggcttccagctcgtccgacttgtacttgacgcggacttcctggacgatcctcgcagtggaaaacgacattactgtaggaagcctagtcgaagcggctgggcaacgacgtagcctaaagatggaccacgaggctctccagccggtcagtagcattcaatgtgtactctctagattgttttgagagatttcgtcgaggcgtagtgttcaagaaggctgggcgacactttggctaacaacaaggtcctgtttagctggtttatttgatccagggaagctcgatcgatgggaatgagacggggtttgttgattatttggaattattgatcgggggaaatgataaaatgacacgtcattcaagccgaacactcacttcatcgaaattgttgataacaggatctcgctactatttcctgtttaactagcaaccaccgctacctctggacatgaacatcttgacatccaaatctactcgagacagacaacctcgacgagctcttctaccaaacacataatagactcatcgaccgaatacgcctcaaaatggacgccagtgaagcaagagaggtcgtgaccgcctggaaggtctttcgaacggtgcacgagatgctcgaagatcgggtgagtccgaacgacgtcctgctcgaagtctacattggtacaaattcgctgatatatcaccttctggatgacgaacgatgaacagggttacaacgtcggcgaagagcaaaagacgatctctttccccgatttccgagagacgtacgctgccaacggtgttcccgagtgagtcaaaatccgctctgtcaaactttacggttctcaaacctaaacacgggaacgaccgctgtcactcgaacgccccagccggaatgccatgtcaaactggttccaaacgagagaagccccgatcaagaccatctacgtcaactttaccgacgtcgagaatgtagccaaaaaggacatccggtcgtgagtccacctcgctcagactcctcaacgctcgaccagcttgcagatactgatcctttgtgatctgtatattcctcccttatctccactgccacctacttccttttggatagattcgtcaacgtcatggaggagaagcaatgtgaacgagggatcatgttgtaccggaaaaagctcacaccttctgccaaaaaggtaagcctcgtatcgattcctacgatttgctatccgatgttcatccccataatatcaccatcaattttgttctggcgttccgctcgtgctttcgggcgtatctgtctttttaccctttcttcccaatcatgggcacccacctacgcatctcgacttgcctatcgccgcccttgcacctctcagacgatccaagagctacagggagactacaaaatcgaggaatacgccgaggctgacctcgtcgtcaacatcaccaaacactttctcgtgcctaaacacacgatcatgacggccgaggagaagaaggagcttttacagcgatagtgagtcctcgcttctcgcaaagtgtcccacctgattgttgatcgcgcccccgccctgtacatcggtagtcgtcttaaggacacccagctgccgaggatacagctatccgaccccgtcgcgcgatactacggactgacgcgtgggcaggtgatgaagatcgatcgtgagagtgagacggctggaaggtgagtctgctcgctcggctcccctctgcgcttggaaggcgtgtgctcatgacgagcgattcctaatgtggacgatcatggtcgataggtacatcacctaccgagtcgggttctagatggcaggcgttcgcaaaggacgtggcatggatcgacgatttcgaatctccattacgagaggcattcgacggggaagaccgcgaggcaagggcatttcttcataccttttggtgacgttctcggtttggttttttttccatctttcggtgtttttgtaacgacatactatcacgtgcatatgatcgagggctagggatcacaggtccgagtagtatcgccacgagccatcgtcggggcaaagcgagggcatgcaaggcctgcgatgatcaaggaagacgtagcgacgcgggaataaggggagagcagagttcggatcgagcccggggacgccaggtcgggatctagatcgagcgcgtctcgtttgggcgtgacggttttgcgttcctggtaacgatcttgaagtcgacctcgacctcgacctcgtgcactcggaatggaggatcctccatgccgtccggtttcgtctgcccggaaccctcacgcactctctagctacaagctgacctgacttcatcccgacctgctagccgcctccagcgtctgcgcttccgaggatcaatctcgcgtttcaaaggatggtgtcatgtccttgctctgatcagggatcaatccgggctcggcgcaagaggcctaatccggttcacacaggctcgcaggtcaggaaggacgattcgtcccggtctatgaacttgcatgcttctgcgtcatacgtgactccgaatggtcgtggaaacacgtccgaaagtgcactcactggctgggagcaagacggctgttcgtttcagtgatgcgtgtatagaagatccgtcttttggaggacagccggtttggggggagggtggagggacacctaggcattcgctcgtctctgatagtacgatcacagtcaatacccagcccccgtcttcccgttcgaaaacttgcggtgatcaaccgggtacccagagagtcgcgatcgataagacgaggcaagacgaggtgagacggggacgatcgtcgaacggggcacgggaaacccgggcctgatcacgcggtatatacttcctcaccctgggtgatctctgtcttcctccatctcggtcgtacgtacgaataagcagggccgagctaaaaatctcaacgcttcgtgtggtgtcgtatcatgtcatgtcatttcgtattatcgacaagatcatggttcttcccaaccgccggcatggcggcggatgggtcgagggtctacagatcgaggaggcatccggggggggcttagatcaagagtttctcgatttgttgctgaacggtacgacacggacacggacgcgaacacggcgacaaaagcaatacacaagacgcaaggcgcggggggggaagaaagacccgaaatcagcttctgtcccactcgagctctccctcgcacctcgagcggcgaacgactcaccttgacggcctggatctgggagttcaactccctcgcctcgttggtagtgacgctggcggcgatgacggccctgctgactccacaagctcgaccgagggcggtcttgctgggcaggaagacgtagggtacgttcttgtcctcgcacaagagggggaggtgcaagaggatctcgatgggttcggtatcggcggtcatgatgatgaattcgcagattcctcggttgagggtctatttgagcgggggagggagaaatgtcgggtcgggtcgggcgtgttgtggacggatatgcagtgagactcaccttggtagcctcgttggcacccttcttgagctgctggtagtgagaagcctgctgaaccaagtccaagatctgtttccatcgggtggtcacgaagggtttgctcgtcagctcctgagatgtcacgatgtcgttctcgaggtatctctaatccgagcgatcgaaacgcacctggttggtcaactgggcgttggcgagggggaaagccttggggttgggggtggtagccatttttgtcgaaaagtgttcgttctcttttgaaagtgtcgtgtggttaaaagtggggagattttgtccttgtgatgtagattatttgttgacctcacgactggggatccttggtctttgcttggttgtgtctggggggaacagaggcggcgaggtgtaggaggtggatgttgactctagtttgaacgtttaatcgaggtcggtcaaaggactggtgatggggtggttgacgcgaaaaatctgacctgggggtggtacttttcatatctggcaataacgtagcgtagcataacgtaatacattgagtgtaaagtaacgtaattgaccgccagagacaagaaataaattcagcttcatcacttttccgcgggcaacctcgctcgctcgctcgccagccaacaacctcgtaggttcatatcatctagtcagtccaaagtcgtcgatatcgtcttcatacaacggcggctactagtcatttcacacatagtctcttcctaaactcactcttcatcgcctcttttacatcaaaatgttcggactccgcgcttggcccactcccgtacgcatcccccccaaatcgagtcgaccccgtccaccgtgccgcatcacaagccaaaaagatcggtcggatcgaggtcgactcgtccatccagatcagacctgtcatctcatccactcactctctccgtatcgtattgatcataccgcagttcgcccgccccttggctccctttatcgccgcgaccgtcatcacctactttggagtcgccaagttgcaggacatggccgtcaacagtacgtcttcctccgaccctttctcgtttctccgctctgctatgctctcctggggggagagttaccggctctggggatcttgttctggatcaaaataccgcacgggaggacgcggggaggagttggattggcactctcaagggggaaatggcgaaatgcatcctaaagcgcacgataaagacgtgtgaccacgacattgtctctcgggtgtgatcaacgatcaaactggaggatgatcatgctagcgttgctaccaacgacctccacgcacgattaagggcgggctcggtcgaggttgacattggccggaattgcggactgtttcgacatccccaccaaccaaaaacatcgatctcgtaccgcgtcctgtcacggtcgatcgcccctcgtcagaagcgtcgctctggatcgaccgccgtcaactcgactcgtaccgctctagcaagacaaagacgccatccaccctttggtgtccagaacctccctccagtttcttcccccgcgccgtccttccgaaccgcaaacctgacatcccgaaactgatcctgttttcttaccttatcctacattcgctcccgtgctttgtctggtatcccgaccataccacgatacgccccgatggtgccccgaaacccattctcgtcatggacattcacctttccaaccccactcactctcggaactcgatgcgctcggtacgatcaacgtcttgttactgcccggcgcttgacagcccccgaggccctcgccgacgtgagtcttgctcctccgtaccctcttctcgctcgagatggaggtccacactcccacacttttcgcgatacttggcgtttccccaccgtatgcccgaacgagaacgctgacgtcgctttgaatccggccttttcgatctcttctcgcccctgttttttatcttactcctcttgtctttcgatccgacctggtagcccaagaacccttactgtgagtctcgggcgacattccccatgcgatccttctctacaaggggttaggcgaggacgctaatgttggacgtcaatcgcacttttatacagccaagggaaagaaggccgctcattaaatcgatcaacatctgatggatctgggctgcaaggtattgagaagatagaaaggatggatcgggaggaccctgtaaacgacgaggagggggtgcaagagagagagagagagatgaaaatgagatgacaaaatgatggaaacccctgatcgcgatgaaccgccccacacggtgatcaatcaaaccgctcggatgggtttgcgttcacgaacatgggaccgacgtatcctgctgcttgtttgacgtttgactggcaggggttcatctcgtttcatgtcggacgatcgtaaatcgtttcatcacaggtcgtaatcttgcgtacaagtagaccttgtcgagcgtcactcccgcatccccgggctagatcgaagaagggcgacgtcggggcagtcgagaagggccctaaattcttggtcccacgttgctggggcggagaggcctcctcaaaccaaaccttccgtcaggtacagatggagaagaagcccgcgtcgagtaaagggtcgatccgattccgaaggttgttctggaggccagacgatcgacctttgatctcaagccaaggccgacgctcgactacgaagccttttccattcttcctccaagtgcgccttgagggcgggcatgttgggcgatagctcaccgcaccgaaaacactctagatctgatttcaagatggcctcgtactcgtgcttcgacttgggtaactgcaaatcggcagaacggcgggcacgcagggtatcggctgtcagatcagcccttgtttcccgaggagaaacatctcgacacgcggggtcactcacccgattgtccttgtcatccgtgatcatacggatgacatcgtctagcgagagaaagaagcccgcgtcgggccggaaagaattgtagtgcttcttggtcttcaacgcgggtgagacgagatccgaggagatgacgtgcagatggatgtgtctgaagccgaggagatcgtcaggtcggacggaatgcgatacgaggtgatggcacggagcaagtatcagctcccaggaaatctcgaccactccgatgatccaagactgattcgacggcgtacctcatactgggcacagcatggaacccgacccagacgtcccagcagaacccctcggtcttgttcatttcgtccttgatcatggccacgcagtcctctgcggcctctttcaacttgttcaggaccgtcaaaatggaagaggtaggctgacttgcggaagaaggcgatgatgctgagagcagagatgctgacgacgtttctcgtaaccgcaagagagacgagagcgagtccagatccgaggggaggtagtcgaacttgtctggaggattcgtgttttctgtgggcaggacgagcggcagtcgcggcaataccaggaaatgatacttggctggaaatgaagagggtttcgagttcgacgtgtgcaaaggattagcgacgacatggtgtgattacgagaggagaccatcgggcatcccggatcgggactgaccctttggaaaaatatcaaatatcgtcaatgtgtgctcgtcgtgaacaagacggacgttcgccggtagctctctggccgggtctttcgctctagcatattgaacaagtccatctagcataatcacccggcttgtatcgctttggacccgtctggcaagagcagttggccatcgtgacatggatttttagtcggaagatgcatgcaccatcgaaatgaagaacagtaaggagtgggcgaccggaagcttttcggaatcaggatttgattccgaagatcggtcattttgcttccgagacttcaccgggccggagttcagcgaaggctcggtcatgctcaaggacagatataagtggtcatcgacctcaacttgactggctggagatggtcgcaaagggatatctacaaggccacgagtcccaagacctcaactgacaacgcaatctaattgaccatgccgttctccaccgccaaaatccccgtcaacccgttcaccgtctcccactcggagcaagagatcgacgacctcaagaccctcttgcgactctccccgctctcgatcgacacgtacgaaaaccgcgccgaacacgatcacaagttcggtccctcgaaagaatggatgcaggatatgaagtcctcttggcaaagtttcgacttttctgccgcccaggagaagctgaatgagtaccctcagttcatcgccgacgttcctgatgtcgacccgcacacgggcaaatcggacacgttcaaggtgcatttcgtcgggatcgagaacaaggatcccaaagccgtccctgtcgtcatcttgcatggatggccggggaactttttcgagatcttgcctctcgtgccttgcctcttgacggcacccaacccgccgatgcatatcatcatccccaggtacgtcctcggtcttgcctacatcggcatcatctcgctcataccgaacacttcacctgaaatatcgccgtgacggctttccagtctcatcggcttctcgtacagctcccccgctccagtcgaccgtgaattcgggaccgaggatgtcgcccgagtcatgaactcgttgatgaagggtttggggtacgacaagtacgtcattcaaggtggagatttgggagctttcttgggcaggatcatggccattcgccatgacgagtgtcaaggtgagtgtggatgtgtcccgaaggatagtataagtctgggaatcttagctgctaacgataacatggtgtcttgcttacatgggtacacagccgttcactgtgagtactcggcctgtagaaggatacgtcatcaatccattgaccagcttgatcacgccgacgatgtattccgatcgacgcggcctttccagtcaactttatgcccatgtccaaaccaccttcgatcgtcgataccatggccgcgcccctcgtcctgagtgataccgataagcaaggtctagagaggagcaagtggttcattaccgatggccacgcgtacgcgatggagcacgccacgcgacccgctacgatcggttacgccgtggccagtagtcctgtggctctcttggcttggtaaaaccggctcttacactcgtccaaaacaagcaagcgtgctgaaatgattctctatgcatgctcagggtgggcgaaaagcttattcactggacggacaatacgccttccaaggaagacatgcttacctggctcaccctctactggctgaccaaatcctacccgacgtcgatcttttactaccgggaccgttcgcaaaagctggacatcctcacctcgcccggctctgacactacggatcccaaggtccccctcaaagggatgtatgtcgacaagccgatcggctataccaaattcccccgtgaaatcttggtcaccccggagggctgggccaggaagacgggcaacgtggtattcttcaacgaacacaaagtcggcaagtacccgcgcggcacgcgtgtcgtctaaagtggaacgggatgctgttggctaacatagttgacctgtttcgcatacaggtggtcatttcgccgcgacggagcagcccgaggcattgtccagagactttgtcgatttcttgaacatcgtctggccgacccaaggtaaagatgggatgtcttcggctttgtagcgtcgatcaacacgtaacaaaataaatgactgtacgtctttgaagaagtcttgaagtgatattatgtcgagaaacgaggagtgcgcggatacagatagcgaccggccggtcgcgaacaaatcatttggctgcccgtttcgacttctcggtcttgcccttggacttggccttttcacccgccttctcttttacccgactcgcagaatcgtcctcacccttcttctttgtcgacgacgatgcccctccctccaaccgcttcttctcctccaagatcaccttgatcttatccttgcccttcttgcccttcagggtcggttcgagctctatcctcttctcctgaccgagagactccagcaattgttcaatccgtcgagcttccctgttcacaccagccggtggtttagagacgggcgccttggcctcgtcagccgcagtcgacgcggcctccccagactcgggtttggaacgctttgcttcccgtcgtgcttccttggcaattttggcttcttccttccatttccgcttcttcccctgttcgatctgacatgcgtgtagaagagaggatatttagtaccggagaattaggacgagatcgttcctgacccttccggctcaccttcgtcgtgtcgcccttgcccttgctcttctcagctttaccgtcctcttcatccgcccccttgttgcccgccttcttgctctctatctcctcaagaatatcgagcacgatatccctcgggtcgtccgaagtcaagctatccgggtccaagaggcgctgggcaaatcgtaccctggatcggatatgactctgtttgatcgacagggctggtcagctcgttccctcgtccgggactcgtcgggacggaccggtcgactcaccttgctcttcacgtggtcctcgaccatcttgtcgttcttgaatatcctctgagggcagagaatacacgcctgaagtttccgcttggggcccttctcgccgtcatccttttcggcctcggagctcgtatcttcatcactggcggtagccgtgagggaatagatgggtttagagatggcgtcgtccagggagacggggggagcgtctgtcgcatcgaaatcagcgggacgtcaggagacatatggggcgtcgttagacctaccttcatcatcttctccttcgctcatgtcctcgtcctcgtcgccttcctcttcaccatcctcttcctcatcttcgtcatcggtgtcctcatcactgctatcctctgtaaagatgctcgcgtgctcagctctcggcaccgagtcaacggagtgtctctgctctcaccttctccgctcatcgacatgagttcatcccgatcatcatcgtcctcgctatctagctcgtctgatcctgcttcacttcccgattcgtcgtcctgttccgacccagaatccgctgctgccaaagccgatgcctttttactccggagaggagcgacctcgcgttcttttctttcagcgcgtttctgaatccgtttgagcatactgtattagctgtgtagatggctactatattatctggcaggcttcaaactcgccgaacgtaggtatgcgatgtttcgaacaggccaacgatgtcgtcgcgaaatctttctctgatgaccgaaaaatgcttccgacatcgcttaacgtaaaccgtgatttcggaagtaaacctaatcagtgaatttcgtctcatcaaacaaatatcagaaccttttgatcaaaatactcgctttgtgtgaattcaaaagccgccaaggtatgtccctggtcgacacgatgacgatgttcgatgactatgcgttacaaggccaagccgatccggttccttctctgtggcgtggacctggcatagcggggaaaggaaagccttgtctttaacgcacgctttcgtccagctggttatttgccaaaagtaatcaatacatcagtagtctagaggttcgtggttcgattcaccaatcttgtaatctttattcccctttctgtggatttaagtagactaagcatatagagtaactagcggacatataagtatataagtgggctccctggcacagcgcatcgcgtataaaatggtgtcatgtccacatacccagccttgcagtcgaagaaagggacataggtcgaggtgacggccggacatgggggcggaagcattttttgtacatctgtgcctctttcaaattagtcgtctgccaaattccggttgccatcgtcacgaaatacatcttgtaatcgcaccctgatgatacgacacccgtcagagtacctctgtgttccccagtatcatagcatacggaatatgcaacaagattatcgatgtgaaagcatattgagagctaccaaaaggatgctgtcgtacaaagctgaaattggttttgaccgctaacgagatctcaacaatacagtcgataggcaaatggctgtccgaacggagtctctatggaacgttcacagtattagcttggggaaggtcttccttacccacagtgttctcgtgcagtttcactccataccgttcgaagccttaccaaccgatatggcgacgatctctgtgcttatctcaagctctcccgcctcattacaagcagaagcacgaaagcgatgaaacgcctgtaggctggctaggatagtcatggtatagacactcgggtactaaccaacgaaaactcaccaccaccagatatactgagtgtcatcctgggtacaccgagtcttttgttggccttcgggcggccgatataaattcgacaattcgacataatgttctgatcgaacccctcaaagcgcggtaaagtacttgttacatctatatctgcttcagacctatctagaactgcgtcacgggcggcttgcccgtcaggtcccggccgatccctcggaagactccaccgagtgcgctgcgggattcccacaacgggtacaagatgatggcgattccagcagcaaaggaccaggccaaggtgatgacgatccatcctacgaacccgttttccgaccagatgtaactcgtgccgaaaagaggcataggtacggcgatgagtaggacgatgctgagaatgactgatgaccaagttgccaatcggagggctttgttcaagccgacgtaatcaagctctgggatctcgccagagggaacgtgctgggcactggcgtcatggtcggaaacgggttcgatacgggccgatgcggttggggctttttcctctgcatccttgtcgtccacagcataatccgtcgttgcttggggctcttcctcctctacagacgaagggataggcgcaaagttcatggcccgggtgatgtcaaagtcaaagttctctggagagatcaacgaccaggtgatcgagacgacagcaccggtcaccagggccccaatgtttccagctaagagagggtaatcttggccggtagtagtgatggtgatgacaccgtcgttcagcttggccgtagtgaccagccatgcgaccagcccgacgaccaacccgcctactgctccaacacagcagccccatttgttcgcctttttccaagaggtcgcgatcgccactgggacgacaccagatccgatcagagtacccatcagggtgtatagccatcccatactgatcccgatgtagaagaagatcaatccgagaattcccatcacgaccgaggtgagcaccaccgtcaggtgagagcatcgcatgagctgcttctcggtcgcgcgacctttgagggtgtactgagagagcgaaaaagacaaggctcagatcttgctggcagatgaatgaaatcacgtctcgcttaccctttggtagatgtcgtgggtgaccagcgatgataccgccaccaactctgccgaagtcgccgaagtgaccgccaagaacagcaggagcaacatggctactgcgcctcccttgcccagcaacgcggcggcagcttgaggtgcaggcagaccggccgagatctgagccggggtcaagtcaagcccaagcgctcgtgcagagagacccaatgtggtcgccaaggtcagagggatcgacaaccatgccatgcctccgatcaagtaccccttgacggccgtctcgggtttcgaagcgactgctcgctgccaataagcttggtccaggaagacggtactgggagtcgactcaacgggtcagcgtaccatcaatcgctgagagtatcctcatctgtactcacccgcagttaccgaccaagttgagtaccccaaagatcaacgcgctctcgctcctaaaagtcaggtaagatccgtccttgttgtgttcgacggggttggtgacggcagccgcggtgaggagctcgtacatcttgtggggtgacccgatctggtccgaggtaacgtagacggtcagggtgaagagccagatgaggataaacagtgcggcggtatgggaccagtctgcaaacaaggtcgcacgcatcccgcccacgacgacgtagaacgagactaggatcggaatgaggaagacagcggcttgcgtaggcatgccggtcaaatcattgacagtcgcagactgagtcaagtggacagaagggggagagaaaggccttcgtcaacatcacgtatccacagcagcaagggggagaggactcacaccacccaggaccaacatggtcgaaacgatgacattggccaagaagccgaagaagaggaacaccagatgggctcccgtgccccatctcgcaccgataatctccaagaatgtgtgcgcattaggagccttcatcttgaggtttgaagcaaggatcgcaaagagtagaatctgaacggtcgcgcccgcagcgtacgcgtaaggaccggcgataccgaacctgaaaccgacggcagaacctttgcaagagggtcgatacgttagcttgacgatcgtcagaaggcgttgagcgagaccgcgatgaacttactttgcaacagtgtggcagcccaggtccaagcagagacgataccgaccgcgatgagacccggcttgatactcttttcagcggacaagaattcttccgtcttgttgggatcgaaggaggtgtatcgcttctgaatgtaggtgatcagaacctggatacaaaaaattgtattagcagcctgcgtgtgatgagagaaaaatctgatccgctcaccattatcagactgaaagccaacccaaggccgatgacgatcccatatccgacgccttgagagaggacgtgagacgcttcagaggaagacatgatgtgagtaaggtagcaagcctcaagattgacgaatgctggttagctagtttttcgaggagcagtgatgtgcgagatcaatcaggtccaggggcaaatcgaagtaagagaattgtcagagcagtaggtgcgtacttatatcatgccaaattcgaatttctgtcaagatagcaaggattcttgcacggatcattagctgacggaccagatttcattccggtccgtccgttctcgctctcgaccaatccgatcgaggaatgatgactcgtttgacccggagttcaattgaaaccatgcctcaggtctcgacgattgcccttgcttccggatatagtttgctgtaatcggatctggttcatgttatctcgaccttgagggtcccttatcgcttaccttagcgcgcgcctatctttgattctatattctaaggcaccacggccagggtcaacgccgatccatccggaaagatagcaaacacgttgaccggagggcgactagagtagcgtcaattcggatgtggggagattaaatggtccgacgtaagcttctccgtacgtcgtgcacaccaatgacgactggagaacctatcagtgacctggacgtaatcggcatcacccgcatcgctcgtatatcaatccgatttgacaacggccgaaggttccgatgtgcattcggtctattctcgactgatagcagtagtaacccgcagtagtccgatcgcaagtactgcctctctcttgagaccatgcatatatgctttgtagatgcagtttgtgggattgtcatctcgtgatcaagtgcaccgaaggatcccattccccagccgttttcccgcattcatctttccactcgaacccgcgttccgttgactttgcatatcggccatccccgccgcgaaaccaacctttttgaaatgtccaaagaaattcccaccatcatcaaggtcgatcctaagaaaggagctgtcggtcagcaaggtctgcagtgagtgcctcgagagagtactcggagctgtgatatgggttgctggacatgagtgaccttagaggtgtctgtaactgataccgctacttggctccttcaccttgctcttctcgccggcacgcctgtcgtctagcaatcgatggcatcctctcgtccctgcatttgcgacggtcgaacccggtcaggtattccggatggaatgtgcagagtggaccggtgggcaggtgagagtcaaggaagaccatgtcccgagctgctccaagacccatccagctgacacccgtttctgttgccatacgttgccaggtgttgaataccgatgacgctgacgacatcaagaaccttgatctttcgcaaatccactacctctcgggacccatcgccgtcaagggagcgaagcctggcgatgcgctcgtggttgatatcctgtgggtagaaccactcactcttcataagccgggtgactgttcagatgagctgagggtggaaacctgatgatttcgtacggtagtgatgttaccccctttcccgatcactcttggggatacagcgggatttttgaaaaggtaagctcatacgacaccagaaatcaacggttcactgaccttcgtgttaactgctgtccaggacaatggcggcggccttttcacgaaggagatggactcccacgctgcgaaggccatttgggactttgaaggaatttatgcgaccagccggcatagtaagcgggctgatcccgccgttcaatcggctacgagcatcttgctgatcgcggtctggtcgattcagttcccggcgttaggtttgcaggggtttcccatcctggtctaatgtgagtcggcttgaacggatgtgacagtcgaatcaggctcagcgggcgcaaccgacaatgacagcggaacggccccttctcaagaactccttgacacctggaacaaacgagaagcagcactggaagccaccaatctcgacaaatgctgtcctaaagcgcatcttcctctcgccaagggaacctacgttggttcgtcgtccgatctggctgcggacgtctacgacaagattgcggcagagggggctcgcacaattccgccccgtgagcacggcgggaactgcgatatcaagaacctctcccgtggaagtcggtgttactttcccgtctacgtggatgaggccaacttgtcgcttggagatctacacttcagtcagggtgatggcgaattgacgttctgtggcgcgattgaaatggtgaggtcacggaacttcctgtcaatccaaacgaagtagctgactcgcatcgactcttatgtcccccaggccggtatcatcaccctcaagtgcggcatcattaaaggcggagtcgagaaatttgcactcaagcagcccattttcgtaccaggacccgtgagttgtctgcggaccgtttgtggcaaactggcttctgaacaagagattccatcagatggacccgatgtattctcagaagctagtctttgagggcatttcggtcgacgtgaatggtgacggctcccagcatcacctggacgcgactgtcggtaagtgcatcaaattgcatccattcgacaacgagagatgctgaccttttgaatcaaccagcgttcaagcaggcgacatacaggacgctcgactaccttatgttactgggatacacgcgagagcaggcgctgctgttcctgactgccgctcccatcgattgtgtaagccgggtacttggtaatttgcacaacgacgcgctgacccgtgacgatgtgcagcacgttgcttccttggttgacactcccaatgcatgcgtaacaatggcaatcccggtcgccatcttcgatcgagacatcatgcctaacccagatggtcttgagaagagagattacgggcagtgtgcgatccgttcagatggtgagtgctgtgccgcagggccgtcaacagccaacagctgatcgggagcgctcaatcacttgtcaggggtgatctaagcggattcgttttgtgcgtcatgagagaaaagcgtatccgaaattgccgtggccgtcatctagctccctatatgtcagccgatgaatagcaacgatcgatcgctgtgggaaaatcatatcatcctgtagagcaatgagatacgtccatgacaagaagttcgaactgtgaaagcgattcttgacatgatttactcggtggacgctcccaactcgtgcaagtaggatcccaagagcttgcttccctgtggactcgagggataggtcagaatggtgcgggtcagctacttcataagcaagactgaccctgatgaagttgtcagtatcgagcttctcgttcatgctgcaaaagacgacagtccgttcagctttgagagttccccacggatatgtgactgcggaaacgctcacgagtgagcaccgtcgtctcctcgtcccatagggagcaacaagacgttgatgttgagcgcatcggcaaaggacaaggtcacagggatagaacctagaagtagtaaggatcaatcatctaccttgactagagaccggatacgtcgtccagcacgcacctccttctcgagtgtagtctggggtgataccgtagacatcctcagtggccttgtgggccgctcggtagttgtagtgctatcgttacccagcggtgagcgattacgttacgtcattgcgcacgagaggctcagattcgctgctcacgttgggatcagccatccagggttcacctccgtgaaccatctcgacggacatcttgcatttggtgttgatcttggcaaactcgtcgttgacgtatttcaagacgcactcggtgaccttggcagtggtcatatcggggaccaatcgaatcgagaatttacctgttggtcggaaggcgacggatcagctcgatgtgcatcagctgtgctgcaagactgttctcaccctggacgtgagcggggatgacagtcttgcaaccggtaccgtctgccgatcgaatagtgtcagtttgtcacctcgactcggtacgccatgaaaccacttacagaaggcaccctcgataccgtgaagcgacaacgaggggtatcgcattcggcccatgagctacagccgaagctaaaaatcagaacctagcaccgtgcggtgtgtatatggctgcgatgcaacttacggtgttgaccttgtcgtcgtgcaaggtgatggcggcaccgacggcatcgtcaaagtcggaaacctcggcatggatagcctcgtacctcgcccgctcttcgtcggtcaagggggcgaccatctctttgattccggggatcaagatctcacccttcgaggtgacgagcttagacactacgaatcaatgaggcgtgtaagcgcgttacgatcggaatcgaggccatggtaggatacctactcaaggtgatcaagtcggtcatgggctcgtggacggcggcaccgaagactgtggtcatagcaaagccatcagactgagctacaatccccttggaagacgatggggatctactcaccacccgagtgcaggtccttcgagggacccgagacggagattcggaagtagttgactcccctataatcgtgaatttagcgtgaggtttgaatctccccggtcgagatgacgctcaccttagaccataagtcaaacaaggggtcgaggtgttcaaccctatcgcatcgcaagcggcagaatctgggtcagtcatgtacctccagctttcgagacgggctatagcacctacagtagttgtccgagatacaagcacaatcgacgcccttgaagaacttgtccttttcctgttcgatgagctcgtcgagtccttctgaaccagattcttccattccctcgaaacacatcttgatgtttacctaatacatacgatcgcgattgcatggccaagaagagtcagcctggatactctgtcctggccatggactttaggctttccgactcacggggagctcgacgcccaactccttgtgagcctggaaaacgttcaaccaacccaagatgggtcccttgtcgtccgacgatcctcgtccgtagagcttgccggtaccttcggggtccttggtcaaggtgaaggggtcgtacaaccagccgtcactcttctcagcaggctggacgtcaaagtgtccgtagatgaggacggttttctgtcgagattcggatatgatgagtcacgtcgatcgggatatcgttggctctgatcaggtcgaccggcgattcatccgagcgtccactgaccttgttggggtcattacccaattgtcccaagagcgcagggggcaagtcgagctcgaccccgtcgagcatctgtttgcccagaggtcgtttctctatggtcgctccgaggttctcgagctctgcggcgagccagtcggccatggcaaagacatccttgcggcggctacatcgatcggaggacgggagggtgatgagcgtcccgtctatttgaatgagctgtccccggatggaacttacgcaggatctcccgagacgctattcgaacatcatccaacccaggaattctggtcagcgttccaggtccatgcgttggtcgctgagggtttcgatgtcggcagtcccgcatgactcacgaggggatcgagacggccttggccaatcggtcgatgaaagcatcctggtgctcgtcgatgtacttgaggatctcggcaggggcaggcatcttttctatgtttttgaatgcaatgtggtgcttgaagctggttccggaatacaaaggggtaactacgattgcagtgtagtaagtagtcctgcgtatatataagtaaaggtcgtggccggtggtgcatgttcagttttgcaaaagcaaagcatgtgacccgcgtgattcacgatcggcaacgaccgacagcgacaggcaacatacaacgtgagtacagaggtcggagatcgttctcgaaaacaacggacggtcacacacacacacacacacacacacacaaacacacgcacaaagactatcctagctagagtgcacatgatcatatcggctcgatcatgtggcacgaagtatattatacagaccgataggatccccgttcgagagatgccgaaatgtcatgccccattgatccttcatctcgcgatccttgtagtaacagggacgcgcgctatccaccgtgctccatcgtcctggcttccaaccgtctacttcttgttctcctttgcttctgttggaacaaggacgttttgcacgtagatagaggattcagcgatctcggctcgggatatcgaccgatcgattccatgccttgcgccagactgacctcttcgagtcgcatcctctagcaactgcgtatccactgcccctgtaggcatctgcacgtatcgcacgacggaccctcggatgaaacagttcttgatcgccatctaccgtacaacaaggcagtgggaggttaagtcgggccgtattcgagggcgataagtcatccatgcgggtgggagatacagggtggtggacaggggagacataccatatgaggaaatcgatccggatccgataccttgatgttatccagccggatgttcaagaacctatccgattcgatggtaagaggtggccctatgagctcagccgactgatttcgcccgtgaactcgtaagagttgtctggacgtactgatccactgatttcaaggtacccatgatacacagatcgttcttcagttctaccgtcaccacctgctccgtaagcgttttaaatactctaaagcgcagcaaatgggaatctatatgagcgacggtttcctatccaactctcaccgagcgacgtatagtccgactcacgagaacatgagctagaagacaccgagaagagtcgcgagcgagattagcttattgatcgggccgtgcgttggtccgtaccaggtcgacttgccatcttgggcgaatgtttcgatctgccaattgtacaattcgagaaagtcgatgtgtaccttgaagagatgttatgaggtcatagcatgttgagggatacgacatgaatcattcgttgctatggagaacatctcccttcggtactgtaccctccatctcgcttgagcgatgtccgcttctccctcggatctgctgcctagctgtcgaggcaaaacatgaccatgtccgtgactacgtaaatacttccgaaacagcgtccggtcaatccctgaaggtggatggaccagctaccagctgccagctgcttcatgagacgatctacacgatacaacgctggaagcaatactagcaagatagtgggctatatcccccgtttagcttgttgggcaggagccgaaccgatacaaatatcatggcggacgcaccgaaccaggccggggaacccgccgctcgacagcctcaagcgatggccaaccggatgtaccccgtcccaccttactactacaaggcattcacggatcaagcatggaaggcgcacaagctggccagacaggctgggccgacagacggggatagaggcgatatcagtccagctcgtgctccctcggccacggcgctggtagacgaatcggtttggaatccgttcatttcgagcgatcgggacgatctgtctcgcaagactcggatcctctttaaaccgcccagagcagactggatgatagagaacgactatttcgagtcgttcggacagccacatcaggtgagcattctcaagtcaagacttctccgatctcgcctttttaatgtctatcttgaccatgacccagctgcacgtcaagcctgcgagcgaacacgagctatttctaccctcaatcagaccgacagacgttgaccgtcagttccccggctacacatcccgaccttcgagatattcgctcatcgcactccttttctgcttgcagtgacggaccggcaataccttcacctactactccgctcgctcttgcataccaagctcaagctggtcgaggcgctcaccaagacgctacgcccgccagagacgttccagcgggagacgcaagagttgtggaaagataccgggaacgtctgggccaatgaaggcgagccggtatgttctcgctcgatgcaactcaccggtcatgtctcacttggggttcgtgctcgtgatctcgctgtttcgtagtacgcacgtcacatgcataacctggctcttcggatgatcctagtgaccaatggcctacgtgacgctcaagcccggctgacgaccgagttgatgctcaaagcgcagatcgaacggcggaaaggacatacggccgagctgaagaggtacgtttccgagcccacgagccgtccccgcatggtgtggtctttcaagcgagtcggatcgttctgatctcgctctgccttttgcagcaaatgcgacgaacttcgtcgcaaattgcaagatctgagaacggtcaaatccactctggccgcgaatgccgcactcgtcgacgcacccgacgtgaacatggacagtaacaactagaataccggacagccagatctttcgccagaccgaacctaacgacacttgatgacccagcataatgtatacgaaacaacagatgtgctgtacaacgacacgacgatatgcgtacaaaggtgcgaatccaaccggagagacccggtcactttttgaaagttcgtgatcggttccctgcgctgaggtccgacggattctgaggaggtttgcggaaagcggacgtatcgacgatggctgcgattgcgggtcatcccgattcagcgaggaagaaaggaagccgtcgacttgtatgcgaaactcacgcttcttgggcttcttctgctttttaatcttgcccgtcgtgctttcaggtgcaaaggtatccagctgattgggttcctgactgtagtcaaagtcgggaacttcttccgccttgacggccttcttcttgccctttgtcttttctccgttgaccttggtacgttttggcggagaaggttccgcctccgctgcggctgcagtcgccgtttctgaaacaggcgctaccacttcagccttgcgctttttggcctttttaaccgtgacaacctcgtccttgtccttcttgaccttgcttttggtagtacgggaggcggctgggacgtaagcgacctgttccggctcggtcggagcagagtcggtaggtgtcataggcgcatcttcggcgcgcggcgcttccatcgggtcatcgatttcgagtctaggagtcgaactgaagtgcgacaagatgttacgcatgactcggtcggatttggtctgcgtaaggtgggaaaatatcagtcaaggctcatcttatggtcgctatgtactgtgaactcacactcggaccggctttcgccagagcttgcccaaacaaagcgctctgaaaggcctgtgcgacagtcgctgaaggtttcgcctccttggtgggggaactgctagaggctgcggtcgattgttatgagcaagtgccggccaaagcaaagatcactcggctgcgagcttaccggcagtaagattccacaacgtcgaagaaggtcttgcgagttcaatctttgtcctgggaatgccaaccaccgtggcatccgactcggaaccctgatccggttctgccatctcgatatccctgtcaacttgctgcgcgtccaacatggtctgaagtcgatcgcggaaattcttggacccttcctttcggccatcttcaatcagcttgaggagttcgtctttgctcgctcgagcaataggatgcttgacatagacgatattcagaaattcggtatccgtcgtgggaagcttctttgtcaggttccacagaaggatacttggcatgacataactgcaaacgaagcttatcagtctcggggctagcgccttgtgacctaggacctgacttcaatcacttactgaagactttcgtcctcatcccgagctttggcgtcccgccacgcatgcagctttcggaagacgcgctcctccatgtatcctcgttccgacgtgccccatgtcatgggatcgcccggctgcccgtattcgggagtcttggccaaggctcctcgatgactcagacggcttcgtagtaatcccttccatccgccagaaccctccccggtctcttcgtcgtacagggtcttctggtaaagcttcatcgccgtctcggccgagcgcttgaggacgtcccgaacttgatcttgattgccttcggatcgctcgagcaaggtgtttcgtaattggtcgtaaatgttgagcaaaaagtgagtgtccgagcgggcataatgcaacatctcttcaggcaagggtctgttgagcaggaaggcctatcagtagagtccttggaatcgggcgtcgataccggtactgacctgatcctccaatcagccatctggtatcgtttatcggcaacaaagtcacagtaatgctgcaaaaggaaagcgagcgagtgttgggggaaacctatttcagcagaatacgatcctcaaatcagttggaaaacggagatagttcacacactcgtaaccagcttacagagaacttttgtcgcatgataggtatcaaacaagccgacgacgtaaatgtcaaagtcttgctgcaaccataagatgtcactttcggctccatggaacaccttgacgacggccggatcgaccaagaccccgtcgagcttgtcctccctgaccagatccctaagtgccaagagatcgacgacgaaatcttcttcccgagtgctaatctgcatcaagcacaggaacccagtgaatgaccgggcagcgtggtactcgagatcgacggcgatctcgttgctcgcttgcaacttttcgaccatgacgcggtaggcatcctcggtgtcgatgtaggtgaacggggtcgatgcgaacggctgaacaggcacggccggcttgttgacaaacaaggacgaagggtagggaaggtgcttcgtctcgtgatagtaaggatgtttggtaaagtccgacttggcgacgacgggatccctggatgacgtcccatcgttgctattggtctcgccgaagaaaggtgtaccggctctcgagcttgccggcgtgggtacataatcaagaggaaccatggcgtgatgcttgtgctcgagtgtcggctgccaattcggtgcttcgtaccggttgtccggcttgacggtgaaggtgtcttgaggcttggggatatctgcttgcaggatctcgggtgccagtgccgagagctggttcttgccatcgatatcgattttgcggggtttctaagacaaaccgcacgataagcaagtgatcccgaagtgaagcttatgatggtctcacctctctcgtcataggcgctcccggtcgtacggttactgcggggatctttcttcgtccggtagcgatatccagattgatatcctttaaaggaagcagtggtgagtctcccggatgacgggtgagactggtcgagaccggctcacggtagcttccaacaggccatccacggtttcctggacgttcggtgtaaactcgtgcaacacgtcgtcctcttcctgcagctttttcctcgaccgggtcgatttccccgccgcagccgtctgtgacctgtccaccgcttccaccaagctgcgagcgagtttcaggacccgatcgctctgcctatcgagccgtttggcgaagctgcgatcgagagtccggtgcaatttgagatcgtctgcgtccccaagctctccggcctgaccagccagaggtccgagtgacgatcgaagctggtcgtaaaggcttggagccgcatcgccattgccagtattctttgacgagcttgccatgttgatcggggaacttcggcgagatagcgacgcaaagtctgatgggcccttcagcttgtcgtgactacgttgttgatcgagacgtccaaagtgctcgagcttctgtaccagtttgacgatcggcaggacctttgggtgcacgcccttgataaggcctcgagaggcttgcaaggctcgaaaggctcttgcgaacaggactgaagatgggaaaccgaggagacagttcctatgaattccgattcttaatctcttctgtttggtgttctttgattttctatttcgaatgagcgatgagacacggatctgcagagctgatgatgatgaacctgtcaatcgaatcgatgaagtcgttcgttcccaagtctttactttgcgacttgcgagctcggtcgccttggaaatcttggaaagggtagagcggaagcaaatttcgaggcgagggaccagctctacaggtctaccgacctaagcctgtcatgtcatcttcttgttcaatcacaactcacttgcaactggcccgtcggctctatttgacaaccaacaggccagcctgatcgtatcttgaaggaagccatctccaaaaagcacaatctgataagcgacgccgactcggtcactgccaaagtcgatacacgaaatagccatcatctcgacattgaaaagacaaacaaaacaacttcgaccgtcttcattccgcccttttaacctcagcaaatcaaaggttttggaatcaaaatggtaagcatgttaatgcttggcatgtgaaagctggtgcttagacgatacacgatcagtcttccatgtgtcaacgccgtctggccgaagagaggaagcagtggaggaaagatcatccattcgtaagcttggcctctcaaaacctcgagctgctatcgagtctatacgtcgtttttgagttgagcgcttcgtgatatgtagggattctacgctcgaccaaagaaagaggcggatggatctcagaatctgatgatctgggaagtcggcattccaggaaaggccggagtgagttggtcgtcgccgcgcagtcagatcgaacggaatttcaagctcactatgatttgcaattctcccatctattctctgtctcgtcggtctcaacaaaatgtagactaattgggagggcggagtgtacgaggtggtaatggtattcccggaaggtgaatgaacatctctccgtctagatcctcttcgcatctgatccttcgttccgtcatgtgtacagactatcccaaccgaccaccaaagtgtatgtatattcctttcaaggctcaccatgtcgacgacgggtcacctcttgatcgagctgaccaggtgatgaccgcgatcgctttcaggcaaattcactcctcccctctttcaccccaacgtttacccctcggggaccatctgtctgtcgattctggacgaagaaaaggcttggaaacctacaatcaccatcaaacaggtcagtcaccatagagccgtattgattcgcgcgctttcgagaagaactcgagggtcaggccgaggagaaggagacgaggctgactgaacaattccccaatgacgcgatatgtgtagctacttctcggaatccaaggcttgttggacgatcccaacgcttccgatcccgcgcaggtcgaggcctacacgatgttcaagtaagtctgatacgaatgatctgcaccgaaaccagcgtcctgatgccttgtttatttaggaatgacaaggtcgcgtatgagaggcgaatcaagcagcaagccaaggagagggtccagaagtaggcggaaaagcatgtcgatatcgcctgatgccggtaaccctcgtcagatttttttgggtatcactgtgggtcgtcaacaaagcgtccgccacatatatgcatatactggacctacatccctacacatattcaatgtatattatcagtcacgtccatcctcaactcagggcggcttcggcctctgctttggatatttcagcgagtgaaggttcggccctttcgaagtctggcgagaacagaggatggtgagcttgagcggcagacccgatgcggtggtatatatcggtatacccacatggccaaaagtccttgtgcttaaaagttggtgccttgatgtacgtctcaagttctctacgaaggctgaagaagatcgatatgtcggagtcagtatcgagctagaagtcttatgatgagatgcgattacctgttgtacagctcactttcttccagctgcggagcgccaagtcgaccgatcagtccagctgctgcaaaaacagacaaacagagagtgactcaccagcagcgcttgttcccgcatcgtttgccaacaaccaacagcctttccaaaattgctactcgagaacgatgtcgagacaatttccttactgacttcggccaagtcttgcatctacagccgcgatttgtcaatgtaacgatcgatcagccatattggacgtcctccttgtcttacggctttgctagtgatgtcccctccatgctccacctctcgcaaaaagtcgccgatcgggtcctcattactgatcaccctaccgggcttgggcggaaagaccgcgggtttggacccagattggggattttgcgatccgcttgccagaggcttgttgaaaagctcgtcgatatcgatcctttggtaatacggtctgattagccctgaaaccaattgagagcgatatcgcgcgaggccgtgagactaactctgaatcgtctgccgtgccattggctcggcccgacttgcgctctgcccgcttgactggcggtgggaccctcttgatatcgagttcgcgctttagctccctcacaacctcttcagtcccctctaccacctccgttggtgggtacaagtactttaccagctctggatggggcggccctaccggatttgtgtctggatccgacacggtagcgagatggaagatcgcctcctgaagccgatgaatggcagggttggatgacacgtatgggtcgaaccaaggatactccgtcctggtgaaacgcaatgtcagtctatgccttgcaataacaatgctatcgacgcttactcgtcttctatctcttcataaacgtccaagtccataccttcgacaagcttgtccatcaagagtaattgattgtctgttggtagcagaggatgatccgcgataggtttgccagatttgctgtaaaaattgttgagagacggaaagtagaaggatctctcgtcttcagcaaacggcatctggatgaagctttacggtcagtgaagtgccgtatctcgcgcacacgaagccttacctgaacccagtatagataatgtagctggtctgcatcaatgaccggtttgcagactccgacctttggcggactgttgatcttgtcaaccgttcgcacgatggcgatatagtccttttggaccatggcttgaacaacggcggacatctgaatttgagaatgatgatcgccgagctccgcccagataaagcggacctcgcccatctcttgataacgtcgcatctgtcatcgtgtgcctgattagagatgctaccttccttctgaaatctctcgctcggctttccttacccctgaggccttcatgaacccgatgacgtccatgcccgcgacggtctccatgtcaggaaatatatctttcggcatcggaacccaagtcttcccgaacttgtacgccttgaccaaattttcctcttcgacttcccgctcttcatattcgacatctggctttgcatcttggtcttcagtgcccaagatctcggaagcgtcagggactgctcgatctacttccatgtcatcggcatcttctttcgccttgggtaccatgatggtgtaccgcttgaaaggcgtcacatctgcctcgataccggcactggcagtttggggtgcagtcttggcttgactttgagattggctcgcgcccgttccgaaaccactcggatgaagacgattctgcggcaagagctcgctcgcgatgacctttttcaagctcattggcatggcctttgacgtcgccttgctgtatcgtacggcaagttcgatgccttcatccgggttgacatccttcgaacctatccggaatgtcgacttgttgaggacagactcgggttggctgattgagggacctcgggcgatagacaacgccaattcgatagagcccaaagctggttgtcttgcattgtcgtcatcctcgcagagttccgccatcttctgaacgaatttgcgccagaacctctcggattttggctgttggatattcttcagcgtggctccgacctctcgtccgaattttgcatttccgccggcttaccagctcatcgaatgcgggtttgtcttccatcaattcttccgtcgaccgcgtatcatacccaaccccgcttcacggcatgttaaattcgttcccggaagatcgcaatacttggagtaaacttacatccacctcaaaacaatttcttcttcgaaaagcatgttcatgactgtctgccaattgtccgacttcagctttgccttatctgcatgatgtaacgcgattttagtgacattcttagaaacgtatttcagacagggcgtaccgtgggtgagaacgacgacctcccgtttgaatcccttactcttgctcgcatcatccgtaaagttctgatgagcgagaaccagcgcagccaaggctacatgcaacgcaaatgaaaccttcagccattcgcaaccattcgagtttgacgaacgtcctcacgatttgccggattctttccgggtttgatacccttgacgacactaagcataggcggagctgcagtctgagggtagatgactgatgctacgccgatgtaatccgcaggatccgtcgcctcggcttcagggtgcgaagtaatatcggccgcaaagtaagggttgttcgtagctgaagacgacgaggaaacttttaacatcggaagacgtccgttgtcagctcttctattggtgtgactttgcttacctccgccaaaggtgatcacaccggcatattccgtctttcgtcccgactggatctgagcgggcaagatgggtaagtcgaggggagctcccggcgtgtactgctttcccagccgtcttgcctgcttactttaggggcaatctttctctgtatatattctttcgccagatcgagcttctgaacctcttcattggtgctcgggtccaggattttctccgacataccctccgatacgtccagacagtagatggtgacggtcttcgacatctctgcagccggggtatcggtatcgacgtgttctgagccggttcgggaatcgacacaaccaggttactgttctctgcagatacgttcagccactgcatggagatgtcatgaaagataccacatcgaaatcgcaaggtaagacagtaatagtagattatcacagtcgcagccggtaggaacttgctttgttttgaatgtcaagcagggtcgatgagcgcatgaatcatctccgagccatcgcttacgtaaccccccccccaccccccccccaaagtggtctgacattctcagtgtattgtgaccggtataaacatgtcatgcagcgttgggaaacgagtgatacagtcggtaggcattatggatcgaatggaaagcgaaaggtcattattcaagcggccatcaaggtcttgcctgttagtccaaaccgtcgttggaaggagcaaagtagaaccccgcagtcaggacgaggtacctgttggcaaagcacgagtatccaccatcagataggttctggagcggaaaagatattcattactcacgcaaggaccaagatactacctcgatggtaattggatctcgcttcgatgtaagtgtaggtcatcaaaaagatcgaaaagattatggcgatgacgtcccaacgagggaaaatcaagctgcaagaggagagccacgccgtgtcagacagatgtgcgttcgcacgaattgagaatgcatctgctcacgtgaacgtgtctaccatcgtaccgatcccgcctgggtcgtagaaagccgagaaggcaaccatcgctgggatctgtaatagacacacctgcaaagcgtaggctgaaccgatctccatactacgccgattcaagatgcaaagtcagcgcttgcattcagtcttgtaccccacacaaatccttacctgagcgcaatgttaccgttcagggcgaaggagaacgcgttcatgaattcggttgtattggggacgagcgcgaacaaggtgatccccaggaatttttcatcgattcccgagccttggagaacgacatcgacgacgtcgacgagaatttctatggatgtgacgcttgtcagctaagtttgaggatgtaaagagttccggtgacacacctgcgatagccgcatacaagacggtacatgagagcaacacacccgcgctgaccattcggctccagcttggaccttcgtgtccaccagcttcttcctcttcctgcccagctggctctccgtgcgccggatgcccgactttacggtgcgcggcatgggcatgttgtcggagcgcattgacggttgcggctgctactgcccgagtaaagtcttccggagtgagatggttgggcaatttcatcggcgaaagactgccatctttgacaccacccgatagaggtctcatcgatggggtcccgttttgaggcgtaatcgaatggtcggacatgagggacgcctttcgctgagggtcgattccgttttcgcctggacgagcggccgttggaagactacggaaaccgggtgatcgcggctgaagcggatccgccccggcctgactcgcttcgcgtttggtctgctcggcggatcgagcggtgggcaagatctgctgcatgagcgcttgtggggtgagacgttggtacatggatgcgcgcacggccgggtgcatggtgcctgccgggatctcgtcgactttcatcaactgttgagggttctgccagatctgcgaggcgtgtgttctaagcgagaaccacagcccgataaggtacgactgtgagaggaaacaagaggtcagtccgacggctacccgcgccaaaatctagaccaactgctcacaaagacaaggatgaccgcacaaaagtacattaaacctttgacctggtcctggtagaatgggtcggtagctggatccgggtgttcgtaataacatcggtcacattgccactgattggaagccgggactttctcatgcgataacgtgctgatgaacgagatcgagctgttgtcgtatccctgaggagcggccccaatgatcttcccacccggtacatcgggacaaccttcgcatcgaagcgtaaactacgtagtgaaagcatctaggtaagtgccgagatttacggatattttagagccgactcacagatccgtaagtctgataaaacagtgtaggtgtgagggtcccgataatggccatgatcaacattgtgctagtgacaccggcacttcgagcgttgaatttctgctctttcctcttgaaagcagccgagatcatactacctccaggcatcaaaagaacagcagcgaggaaactccctacaatggaaccctcgacgagcttgcctttgccctgggtaagggcgatggagtagagcacaatctcgatgacggatccaaaggtggcgttgataacggctcccatgccgatcgacgattgagcagagatactggcgaccgccataccgatgaagtatgacagcgggatgacactcgccagtccgaggataaagatcagggcttgcgatgctagcagctcgataattgggttatgcgtgtggccgtgttcgaccatcggcagcagtaccaggccgtcgaagatggtgaagaagacgaggggcaacaagttgacgaacatgatgttgacaccgccaacggtatacttgtagtattgcatgcctacggcacggtaaatgcataacagcacggtcgaatcaggtcctggcgtaggtgccaattgtccggccttcagcctcgctcgtctgaatttcaaagcgggatcattggcttcgctgtcaagcgtcggagaggatcctggcgatggtaccgggacagcgaccttgggtgcccttcgaaatttaacgtccagcggaccgcgagccaagtgtttaagcagggcccatgtcagtctcgccatggggatcgtaattaccatcccccagcagagcaggcacacagagatcaatgcaggggcgatgaagactatgaaaagcggccaatagaagattcctccgacgaggcgagccatacgggaatgaggcggagaactattaaacttggtagggatccggtccttgcctcgatccttgatatcgccgttgtagccgattgcaccatacaagctgtcccgtgcctgcccattggatcccttggcgaaatcgacttgctggacgtgacctttgcgtccgatcctggtctttggcaccagaggatctcgctccgtggtcaactcggccggagaaggcttccacgcatcgaccgaagtgaccgaattctcccgtgatctgaagccatcagtcgatgcacggggtcctttgacggtctttccagagctcgtgctggcagactcgctaggaacccgccttgcttcggtctcgtcgacggcctgttcgacagcttcctcctgttcggtagcagcatcgccctcttccccagcgagggttgcctcgagttcgtcttcttcgtccaagaactgttgtttcctctcgaatcctttaccttcgacgtacttgccaaatggccatccgatgtaccatcccaaccctgcgactgtcctcgcgtaccctccagcacgctttcctctccatcctaagccgccaatgacctctccgacaagtatgacgccggccactccgaagcagagtaaagctaaccaccagccaaagatcgcggtccataggagattacctggtagcagatgcctctccgccgcggcggacgggatcgaatggagtgcgaattcggcgttgcgagtgatcgaacgggatttcttgtacagcgccggcttccagattggcagaccgaacggatgctcaatgttgatcgcctgtaatggagaattcaagtcagcttcgaccgcgtccgatgtccgcgatatctgagcgggtcgaaacgccacttacgtcctgtctgtccctgacggtcactccttcctcgtccacctcttcgtcgtcctcatcctcgttatcgtcatcttcgccatccccagcatcttctcgcatctccctatcccgttgctccccgcttcccagctcgctcacgacctgctcgatcacgctcgccgccttgcctacacccaggtccctatcctcgccggcgtatccggcagacggtcctaaggagggcgaatccatccggtacccagctactaagccaggcgtcgtcggccccaacctgggagtcttgctgcctcgtccgcccgtcctcgccttgtcctggaatccttgtctcgtatatcccgcttgcgagcttgacctgccacccgactgttgatgatgcggatacccgccagccaatggtgtagctcctccactctcgtctcctccgctcgtcgctccgccccattcagagccacctctctcgatagagccaaaggggggaaagtaacccccaggcgtctcggccccaccgcgctttcggcccgacaggctgacatgtcgctcgggaccgggggtgttcatccctgctgacctcgaacctcctcccataggagtagacgggaccgagtatcctcctgccccatgccgcgaaccataccgcgcctggtcttgttgtacaaaaacgtcctctccgacctgtccaccttcctcttctgggtatccgcctccttgtgggttattgggctgcgagtacgagaccaacctcgcgctggccagcctcttggcctttctcctctcgatctgtctctgcctgatcaattcttcacccttatccctcttctcccgctgctgctgctcccgatgttgttgaaaggttgaagggtacgtcccgcccctccgatgacccgcttgggagacgctcctctgaatatgatcctctggatccccggtgctttccctctcccgctcgtcctcgtccgcactggttgattcccgatcatcatcatcgtccccgcccctggagctggtggtatcgctagcgggaaacccgcgggcccgagagacggatctagagggtgccgccgaacctgtacggcgaggatacccgctcgtgctgcttccgagactcccatacccctgttgttgctgctgttggtactgtgaagttggctgtcggctccgggatgtcggacgagaggtagaaccaggaggatggaggtgtcgatctccaaggcccgatggagttcgaggcgctgatgctgctcctttcaagctgccgaggttgccctcgagctgcatctgcaaatgctgagcctgcgattccttctgcttgcctgtagatctggtcgtattgttgctattatacgacgtggaagccgctgacgacccatcattcccgggtggtaggtagacgatctcttgactcttcgcatcgacgccgggcgagtcctcgcgggcagaaccatcatcctcgacgtcttcctctggaatgttatggacgtcctttgccggagcgatagctgtaggtacagcccccatcctgctagtggacgatgacgctgtggatgtggttgattgtcttcctcgaacgggagaagaggtcgaggacgaagagttcgaagggtggttgtgtttcctctcgatattcgcccacaacttgttctgagccgaggtcgtcaggtcgtcctcgataccgatgttgctgttgctatttgacttgggtattcctgtcgatgaatcggtggtcgatttgtccttgtccttgtcgttgttctcgttgccgccatcgtcgttgttggacggcatgatgattcctctcgtcgcacgtttgatggtcgagatatgctctagctctctacggcacgtaacccagcttgcacgatgagtttgatctgatcagaagctttgccaacgatcaatcaatcaatcattcaatcaagatcaagagaaagaaagacaaaaggtctaacgaggcgaggcgagatcgatcaaagggatcccccagttccctcctgttctgatgtgacccgtcttcgatgagtgaccgagtgatctcatcgatcccatcccatcaaatcctaattccaacctgtgccctgccctgaacactctccctccttcccgtgccgttgacctgaccccctcgcgcgccgagcgtgaaccacttgttcggcgcaacccgacgatccatctttacttttaacttctctgacccctcatgccgctggccgctcatgaggatcgaagcctaattgccacggccatcaatttatccctcatctcagggacatgttgttgatattccagattgatctactccgggtctacgggagaagtatcatcgaaatcagagatggacctcgcagttgatacagatttgttgccatcccgccgacctgggatccggcccctcttttccaacccaccatcaggactgaatcctcggcacagggcaagtctgacggcaggaacatccggtaagaatcatgcacagcttctaagagacccgcttgtcaaagtttcggcaggaaacacggggagaaccccgtttcagcttttcccgcgagaacccttagctgtcgcaggcgatcagccatcactgctcgtttgagcatgtgtacgtagcaatccggtcctcttggtgactctgtttatggcgagtgatcagccacggtgaacgcggtgatgaacgctatcagccaccagctacgagctaccagctactagggagggacgtcggcgctggaaatatgatcctggtggtatagcgagctgcaagacctttcagcagttgtgcaggttcgcgaatggccgagggttgtcaccgaatcgattgtttatcaatcaatcagattaagatacacaatcggcttgacgatgacgtgtcattcccgagaatatgcttcctcaccggaagataatggtttgacgatcggaagctgatcgaaaagttgagaggtggccgaagtgtacggtcgttcaaaccgggttcatgaccgcacgatcatcaaacattcacccatctgtccagaaatccactaattcacttagaaggtgctccagaacatcatactaccatgcctaaccctcgtcaacgaaagaacaacaagaatggaggttccggagggaagcccaatgctaacggtcttcgtcggttacacaccaagatgaacaaggcgcctacgatgaagggacccttggctttgcagcagggctgggacaagaagaagactgtcaggcaaaagtcggtatcgccccgtgcttcccttcttatcagcaaagcccgtgttgtacgcgagcactgacgatttcctttgaaccggccttgatcagctacgaagcgctcggactcttgacctcgattcccctggaccagagctccaacccgacctcgaaacagtccatcaaagaggccgaggagaaccttatcagtggatatgggaggatcgttcgtgatgccgaggggaacgtcatcgatgtcatcttgcccgaggacgaggacgaggcaaaggctggcgaggatgcggccgaagatagtggtgaagagggagcgaaggaggtggcacctgttcctgccaagaccgaggtcgtcaagagtgagtattcctcatgccgtctcatgacgtctcatgacatcaaaagcccactcagctcataacggctgttccatccgaaaatttatagcgttggagatcctctcagccactgccgtccccgtcaaacgacacacgtccatgtcggagaaggaatggctcacccagctcgtcatcaagtacggggacgacaaggctagcatggcaagggatgccaagttgaacgtctggcagaagacgagcggagagatcggaaggatgtgagtctcgatttaacaactttgtacacggaacaacggatatctgaccgggctcttgattgcacaggatcaagaaagctggcggtgcggaaaagctaaaacaacgagctgctcaagagggcgattcgatggatctcgcttgatcttccgctttcgtttagaccttcttaccactcccatgacgggatgtacaattggactgtttcgccactcgaggcgataatgacgatcatacgctgcactgaatgggcaaacacgtgtgtgattctggattgtaccgatatcctgtaaagtagacgggcacgaccatgcggcaccaagcgtgatcccagctgtcattgtattctatgttccgatccaacgtagagcttacggttcatcaggatggcgcttttcgaccatatcgagcgatgcaaacgatgtcacagcttacttctagttttcggatcctgaagtcacgctatcgctaatagcgaagtattccgcccatcacatggctttcatatccttgtacaaatacaaatcggcagtacccgaacgtggtagtttatacctaatagcgaattgttcatttctctgactcttcaccttgtcgaaccgcctttaggcctagacacgaagcgcgaccgacctcctcttagtggctccaacaggcgcggccaagaccgaagcgttgttgctatagacgttcaatcggctcgacccgccacacgttcgagtaacatcacctccgcatgacatggtgcaaccggaggcggcggcacctccgccgttgctgaacgaatcgccacaataacattcgcggctgtactcaagaccagctgtaaatcgagatcgagggtcagttattgcgaggagcgacctttaatccaccatgcactcaccgatagagtatccgcgattagcgcaagtctcgacgcaggtcttgacggtcatgtcgctcgaagacacgctgtaagcggcaagagcccgtccaccagaaccttccgtcctgcatccagcgtcttgccagccggaaggcaattgggtggagatgctagcaggcgcgagatcggcattgttgaaaagctggaatgtagcagaccctccgcaggtctcgtactccagcgcagagcacttcatgttgcatttgtaccaatcgatggaagcgtttgcagacacgccgttacgcaattccgaatcgcaatagctgcggcaagatggccatcagaacgtggaccctaggtctgcctgggacgcgcaacccggactcaccattcccttccatattcgacggcagcatattgaaggcccttgtcggcgcagtacgctatacaggcaggtaggtcagcatgcacgcatcggaagataatcgatcaatgcaaaacccacatatgcaagtgttcctggtcatactcgacgaagtggtagaagcagccgtcaacgcacgcgctcctttgggctcggcgaaacaaccaagatcagtccacccagcgctcaaaggctgctgaacatcgacgaaaccggcgttctcggtgtagtcagagaaactaggtttgggtcccgttccaatccagagcgggttattgccgggcaggcggtcaagcgcgccatggtccccgatgttctcgtcaacaagagggttctcagggatgcaagcctcggcagcagcattgttgatgtgaggcaggaaagccggacagtctgcagagatccgctaagggttgtttagcgaagcgtctcaaaaacaagtagactgaaaactcaccgtccaaaacccctccgatgcccaatccggtgtctccgttgcaagtctgtatggcagactcgaggacattgactccgttaccatcgtcatgaggccaaccagagatgaagtccccgtggaatctatttatcaagcaccaatatgggtaaggattgagaggtctaggccagatgaatcgtctacctacccgtatccggtggtgtctccgttagccaggacctgcggaaggtatgtaagcggaagttcgctgtcgatctgggattctgtctaacgtacccagttgatggctccagtcgtagtgttgctgaaacgtgccccgtcagcttgaccactcagcagagctcgaccaaggaaactcacaatgggaacctgaagttaaaggcgatcggtacgcttctatcacggcgagcgaacattgttcgatcactcactgtccagttgggtaaacaaactcgtagaacagctcagggtatgcgatggctatggagaaaaatgctctttcagtgtcatagccgactctagaggaggtttgtaagaggactcacgatgagattcagggcaatcgcctaaaaattggatcgaccaatacaagccgtcagtagaatattcgacagtctgtttgaggcaatctcctcacctccgtcaagacctaggtgttgaacggacaatgaaatatcagcttgacatcgaaaacgaccgttcgaacgtgcgtgcttaccgccagaagcccaagccatatgagacttgtgatcggggctgtcgagctgcccgtttcctaaagcccgtttgtcccagaagcatcagtatctcggaaacgcggcggcacaattggacgggcctatactgaccacattgcctaaagttgacctgcattctcatggcatcacagggcacttcgaagaaagagttgcgctgatcatacctcttgtcacctgaattcattcgttggatcagcacgacttatggaatggctagggcgctatgcactgaccagagtggctctcgttggtcaggcagacgaaagagatggcctggtggtccggattcttggggtcaaaagtcctcctgaaagggtctcctgaaaccatgcgcaatccctcggggaaggcgacagggagtttctttgagcgggctagagcatcccaagagatccctatgagtggagagcttcacactctagaccttcgaggtacttacgcaagtaatacgtgttgacgtaactggctgggatcaaggtatacttgccaccggaatagctatacaattgagctgtcaagcatcacgtcgcggttcatcttagctagcgatccctgggccgactgattggacatccactcacgagtccagtaagacgacttgtcgatcgagatcggagcagtagtacacttgccctcctgagtggcagcgtagtcaacggtcttgtcgaagttggatcctccgatgatggtatgcatgctatcatattaataatcagatcaggtatcggcctagaacatcggcttgtagctatcgacgcgtagcgtaagcgcaacagagcactcactgggaagagacctggcctggattgatgatcgggtccaatcgagtcacttccaagataggatgagtgaggatgaagaaggcttccacagaagcagtgtaggcggccaaggccgagagaagggcgacgatcttcatgatgactgctgggtgcgatggtgatagtgatcgatggggaaacgatggttgatcaggggaaaggtttaaatgaatgtgatttgcgaaggagtgggcgaagtgattggcaaagccggatcgaaagatgtatgaggcaggactgatgaacaagatacagtctgaaagatgagacacattcgctgcaaacgagtcccagatctccaggtatatatacaaggtcgcgttcagctggctgtgggacccaatcgacaggtacccgacacgctcaatcggccgatttacctcaaaaggtcaactcagccggatgagcgcggcctagccctgatgatcgattgttgttttgatgttccacaatcaccgagcgagcgtggcatgtggaagtagcaataccccgattgtcactggtcagccccgaggctgaagctgggttcgcgtggaggacagtaacggctgaacgagcgggaccatcaggcggctccgatgaacgcccaacgccatgaccctgaatgtgcgaggaacgaaaaacgccattttgatcagttcctgctacttgatcgagatctgtaccttaccatcttgttgccctcaagacgcaggcctactcaatgggaaacgattcatggctcgacggctagcgtctccggccttttcatcgctgtccgttcgagaggaaagcctgcatgaaggggttgaaattcgcgaatcagcgggacatctccttcgggtgccgcgggacaggcgaggaataaacaacaagaatccctgaaacatgcggaggaaaccgtatctttcatgggacctgaggcctgaacttgaaccaaacaatgtgcctgtgagatcactttgggctcgttttcgtgaggcagttgcgtcacggtacgatagagtcgctgggacccaggatgggacctcgtgcgacgaacgtagcctcggcgattgagacgtttgttgcccgtttgccggtgcaaactccgttgtttgtcgtatgatcgcgcatcatcttgcttaacccggaaaaccccggtgttcaacgtgtcgttatatggacgacatagagggtcagcccgcaaatgtattcatccaggtgagaggtctggttgccttggcatgtgacgtgtcgccgcaaggtctagagcgtgcggtgaatacaggacggatgagaccggctgatgatcgtatagatccgatcatcctcgtgccggacaaacggtgtacccctcggcactctcatcacgatctgatcggacaggtctatgacgacggtcgaaacatcccaccctctaaactgtaccttcagatctcacgagcctcgtgcgttaccaaactgatggcacaagaagttagagaatcaaggtgtaaccaaggatgaagaagcggagacgcccagtctgcagcgctgtactatcaagttgtacacgtccgggtttcattgacgagtactgctactcttctcgcaaaacgtcgatgtcatctgggcagagaagtttccatgtcgaggtcgagatcacctggggtcccttcgactttatcggtggaggcgagctggctgcaatcataatattattgtcagacgatcagtacataggctacaaatatgtggtctatcttggccgcagtctgtttgtcaagaggtcagtgattgagctgcaggcaagagacttcgctctcaaattgctctcttcatacaatggcggtgatgaaggtccccgagatcccagatcccagattagcagcttaactgagtaggttatcctcacgcgacgcgacgcgttttcgacgcgtttctcgcccggcaacctgctttgtgggtcgaatcgcttgctgctttaacaagggtcatttgatcggtaagaagcaagtcgaaagaccacagcttgacggggttacctagaaggagaagatctcagttgtccttaatactctcagcaagaggatagacatctggtctgaagtacccgatccttacgtgtgtcttcaaaagcacctgcaagatggatgatcacacccggtcgctgttgatcagggatgccgagcgattggtgaaggatcatatgaaagcgtacgatcctagtcacgattggttccatggcaagttgtcccttggtgtggggcgatcgatcgccacgattcccgctgaaaacgatgttctctactactgcggtttgacgacactctagttgatagggtacgaaataccgctttacgtttgagccggcatcttcaagcgagcgagagttcgcctctggacgacctgctcgtcgagctcgttgccctctttcatgacatggccggtcagtctaggagcggtcacccaagctcttgccgcatgctaaaatagtcgcttgccgatgatcgttgatcggtggtcagacggtaagtctagatcggaccgcttcatacacagctgtgaaccattgattaattcctcaattgcgttgtgtgcccttgtataccagccaaatacactaacacgacgtcgctagccgagaccctctccccttttctcacgtccaccttggccaaaacgcatctcagtcagagccagaatgacaatattctcgagctcatcccttgcatatcctggtcgacggaaaagaagcttcggcaatcgggcgaatgggaccagctggagcagcggttgaagcgagaggagaaatgggacgtattgtgctgtgtgcaggatgccgataggttggacgctattggagctttcggggtaggtccggcgatgaggttcttgttccactgtccctgaatcacacatttcctagatcctgcgggtagctgcctattcttcagccgtgaaccggcctcttcatgttcccgctgcggattcagaccgatcccaagatgcggaaggaatggaccatttggatacccttcggcaaggctcgtcgattcagcatttccatgacaaattactcctgataaaggaccgcctgaaggtgtgcattgatgtcggccaaggagtggtctagcctcccgcatactgacacaagtctggttgtgaaagacccctatgggtaaactcgaaggggagaagcgacatcagaccgtgagtctgcatgggcagtcagaggacggaggttcatcggcggcatcattggctgatcagactcgagcgcttgtttgataaatagatggtcaccttcctagctgccatctctgacgaatcagacgagcgctaagctggtatgatcgccgaactcaagcactcgggccaatcacgatagtaaggagtagatgacagcagcccagcgatcgttcccttgctacgtggtagatctcgatcgacccgcttggtgtaggctgtcgtccagacggcgccgattgtgctggaagtacggggaccttcgagtcagcagtcgtaaatcgttaccacccaatcgacaagatcctcggcgtgatcgatcggattggcatttcgatgacagcctcgattggttgcgtgtaaaggtgtgttgtattgcatgaatttgctagaagagctcacgttcgtcgtcgaaccgctgcgaagaggagttcagggctagttgcgagaaatcatgacgatggtatcgatgaccacgttggaccaacgctgcggctttcgtcctgcctgctttacgacagctgttcttggacagacgatgctttctgcaaattgcatgatgtacgagtgatgaccatgtccaggttccgttccttcagcgcaaccgtgctccggatccaccaatgcgctcgcaagcttcgcgctgtaagcacgacgctgcgttatgctgcccactcgagacgagccgagtcgtactgcgctctgttccgattggttcgaaatcaatccacttcgcccgccgaatgatgctgtgggcttgagaagggacgttgttcttttcttgtcatcgccagccgggtctcacatgtctgctatcgcccgccggctgtgcaggacctcgacgtactgcgaagccttcttcgagtacgcagatcacagggcagggcagggcagggaattacagaaacgtttcttgtggagcgttgatcgaatcgcacgcgggaatgacgcctggtcatcgtcgatcccccgcggtgctgctgcccaagggttgaggaccccccggatcatcgcttacgtcagtgatggtggcgcgcgaatgcaccgaaacccttttttttctgaatcggctgcgctgctgcgctgatgccacgccgcgagtcaagcagatgatcacccggcgctaaacgatgtctccctccccgctagctgccgagcaatgacgtttcgagacttctcgactctaatctttccattctcatgtcctcatgggaaccgtctcgatgtggttgcaagggcgagagatataagactcacagccgcaaagccgccgtgagaggatactacattctgcaaagtgtctgctgttcaaaccaaaactttcggatattcggaccaatcttcttcgaatccttaccaccaaccccatgataatgaagttcgccgccaccgctgccgctgccaccgtactggccactggtgcttctgcccagctctcttctcctctccagctattgcagtatgcctcgcgactgtaagcaattccgactggaacgctgttggacctacgtctgaccatctccttcccatcgtcatcgtaggcttactaccgagtgtcgtgaagccgtcaccggattggtgaccggatccgaattgtcgcaatgcttgcaggttaacaacctcttgcccagtgagttccagcagcggcaataattcatctgatcatctgtagctgagttcgtgacatccgtgcagtcctcaacaacgccaactcgagcgtcattcccaacgtcaacgactacctcgtcgagctctgctcggccgaggcttgcaaccagacgaccattgacaacgccactgagactgtcaccaccgcttgtgctaccgaccttagcaggttcggagtcagccaggacttggtcaggttcatcatgaacgcctaccccaccgcccgagaggtcgcttgtctgtccaccaagtaagtttgggcggtacatggcgatagatgcgcaaaagatcaatgtattgatcggttttttcccttgcccacgtttagcgacaccgagctcgtcagctccaactcgaccaactcgacctcttcgaccaactcctctgctctctgccctactgcccttttgtacaaggccgaggaatacctcggagtcaactttaccaacacttacatcgactctctcatcctcggagccaacgccaccgcttaccgccagctcctcgccatcccccacaacggttccatcatcagcgagtttgcttgcaacgactgtgtcgctgccggtttggaggtcgtcatccgggactacccccagctcgagaatttgacctttgagctcggcgtcgatcaggtggaggagtacaccaactacaccttgcccggcttgaaccagaccgagagggacaacaacacctggaccgtcgctcgtctttacgagggattctgtgatgtcgacgttcttgccagtgagtatctgggcgtcggggtcaattttcgaaaggcaagcaggcgctgatccgcgattcttcctcagactcgtcgctccctgcttcgatcaactcgaccgcttacaactcgaccgaggagtcctccaccatgatgacttcgatggttcccactcaatcgtctgtcgcttccgccactggtgccgtctcttctgcggttgccatgactacatctgctgcgggctccgccagtgtcactcccgtcgctcccgtcgcttccgccaccacggccgtcgcttcgggtatcgcctcgatcttgcccatccctacccaggccatcggtaccgccgccgccgctgcccctaccaagcgatgggtcaagtgggagtaaatccgactttcgttcttacacctaggaaggctctggtcgacgacttcttccttcgacacagtctagacccagaccaaggacgtttagttcataggaccgaacatcaacctacacttgctcccatattcaccgcacctatacataatgccttgctttttctttagatgatttgcacttatacctcgattgttctgatatacacgcacgaggcaagccatgtatccgattagccgtcttcatatgcgaatgatccattatggaccagcgtcagcttttccggcttccggtttggagattgagaacaaggtgaagtgatcgtcctcggtacgctgcgttgggtgcgatttaaggccttagtggtagtctgtatgatcgtccccatttcgccccactcatccgcggtgctcgatcatctgctgtttccagtttccactacgcgtctggttggagaagcgagcgagcgatcaatgatccctctagccagcttcgagtcgagtcgtccacccatctcaccctaccccatcccatgccatcccatcgtcacctatcttgacacgggatagaacctacatcaaccacaaccaacacgatccaattagatcacggttcatacccgtcacatcatctagccttggcctaggtatcgccataggctggtgatcagccgaacccgatatccccatctcatccggacgcgactcaccccccctccccttccgaccgggatctctcatcaccgagcctcagctcgtcgggaagttcgcccgaggtcatacctcaggtcaacgaccgtatcgttcgaacaggtcgatctcgtcgatccgatctccccatcgacctttgtgtggaattgtcagcttcgtagcgacatccagggtgcatcctccgggtaccactcttgcccttcttaccgtgcgaccatcgacgtcgttgtcgtcatcgcgatcgccatcgtcgacagcaatatcgccggaccattagcgacacaaaatgcctcgccgtaccacaaaggacagctcgtcaacccctcaaaccctatccaagacgcttccccctgcgacgcccaacccacctctatccccgttgatccagatcttgaggcgagactggcgatgggcgtctatcagtcaattcttatggacgttcgggcaggccgctggactgagcacatgggatatcgacgtgagtctctctcctcttttccttcccatcgtctccctgcttcatcatccggctctgcttcgggcgtcatcgagctgatccccgggaatgttgcccctgcgcctgtccgtccatgtcaatcatcttggtagttgttcgagaccgacttggattccccggaagatgacgtcctcgtccccgagacggtggtcaaatttctgtacacgttgacttatgacaagaccgtcaggtgagggcttgtttctccttccccccccccctaacccctaaccccctaatccctaacccttgtctccacttcgatcacgtgataccctttgccaagaacatcccgtctgtaccgcttcgtcgtggcttgaatccagttcccgtcatgtccgaagggctagcgtctcgcgctcgcaccggcggcctatgtcctcaacgagctcatcccgacggacggccgccagggcaagtacagcgacgctcggcttgcaaagtcatggtcggtcgcttccggcgtatcttgttcgcggacgtgtcttcccgacggatataaccctgagttatgagcatagtgtctcatcgagctagatgagcgagatgtgaacggtgcagccatggttcctgttctggcatcaaatatcaagtgttgggtggctgtcggcctccaggtgtaacccatcgtgaccacgcccctaatttggcgtcagccggtgtaagcaggtccacgatggacgcaccgcatcgccttgagcaggacctatacctccactatttgcaagcatttctccatctcttaccgaaaagcgtccaactgttacgaggccaagctcgagcatgatgaaagccttcaacagacatcgtataactgtctcgggactggacctgaatcaaccatctccatgacatgtcgtgtcaggtcctaggatttgactcggacctcaactaactcgtcggatagctgtcaagaggcgcactcggacatggaatgtcgtttgatggtcgtctggaatggacttgggccacacggcatgacacaacccacgtcgttctctggctctgacatgtcacgctggtccgcgtcgccgcgacataccaacgccatactctgggtcttaaagatcggtctcacccctcatccgagcaaaggcctcgaagcgagccgaaggaaattttcttccgcatcgatccggtctcggttccgccccaaattacctctgcgtccccttcgtctccagtagtgtgatggtctcgccccgaattatgagcacggaacgtgactctccatgcttcggaaaattcaccagccgggcgctaagcaagtcgacccccggtcgctcgatcgggagttctagggtcaaccgatacctgactacgaaatgctatgagaaaagttaggcaaccccctgagcaccttgaacccctccgtgaccgactaccagtgatctgacaagatttggtaccatctggctcggggtatgaccaacaacgcactcttcgatcgcgagagtctctccggcgtttactcacgcggcgacgacgcagcgttacgagcgaggctcggcacttgtctcggataacgggacgcgatgtgacgatggcgtgactaataaatagtccgaactgtcagcaactcatcaggtcggtcgccgcgccgcccccactgccccgaacacaggcgtttgggcgacactgaatgtaaaaaagtgaaaccctcgtgcaatcgcaggaccggtcgactttaagcgacgccgctacgggcttaggtgacagacgccgctggaatgagaatgcgatgcccggacctgtcacccaaatgaaacccgaactgtcagccaagtcaattggtgaatcaaacgattcaaggcgacgccgtgcgagcgcggctgcgtcgactatggtcggaacaggaaaaaaagggcatgtcactcgatcgagggctagcaccgaccaggatatatagctgcagcgactcgccgtgctcgatagtggttgttctggttggccatgttgaacaaccaaaccgttcaactcgacccaaacgcaactcgacctcctcccctcgacgcctcctgtctcttcctctccccgcctcgccatcaaacccttcaaccctcgactcttctcttcacaatgcgattctggcaaaccattacctttctcttgacgactttgacgttggccaacgccgcggcggtcagccctgcgcgagacaccactcccaacaacttgggcaaacgtcaggtcgtcggcgccaacatttgtgcgacggtcggacctttgaccgtacccaacattttgcccatcctccccgccatcaccgtcatctcggtgagtaatcgcggatagcctcggtttgatcgatctctaaggctgacctcgcgtcgactctgctagcgaatctgcctatgcactcaaggcggcgtgcttacccctcaatcggtggccgacctcaacacccaattcgatctggcccgtcaaggaggcatcctggaccctctcctccgaatcgttggcaacactgtggctggactcttgaaccttgtgctcggttcagccaccggccaagtcaacaactcgggtggcaagtgtaccactgctatccccgccaacggcttcccgacctgtccaagcacgggttcgcctgccggtacttgttcctttggatgcgccactaatttcaagatctgtggctcgacctgcatcgcctccacccaggtctgccctaccggtgttcgtcgacgtaacgcgttgaccccgcaaatctgcccgatcggttgggaagcttgtcccgtcaagactggcaagactttcgtttacgagtgtgtcaacacttcgagcgatctggaatcgtgtggaggttgccctggactcgccaatgagggagtcgactgctcgacattgcctggcgtcagtgatgtggccgtaagtacgatcgtttgcccaattcgaagtgcccttgctgattcgatccgcgcgccctttgcttagtgcatcgccggacgatgtaaagtcctgagctgtttgcgaggtttcggaggaccgtccgaagctggatgcgtcaagaagcacaagtaggaaccagcacatgcaaaaggacatttcgcttcattatagatcataatcatttagacgtcgactacgctcgctcatttgggatggatatactcattgtcgatcctttacccgtgtatactcgtatcgagacacattcatattaaaagacaatcattcccctagtctctcgctcagactcgcggtatatgctactctcgagaatggtcgacatgcttggcaaagaatgcgatcacctgtctgtcgttagcaaccgcagccgacactgcgcgtcagcaaagtagttcgactacaaatcgatgatcagatcgccaacggcagcagaagtagaaaccccttacaggttcagtctgtgattcatcgtttatgtgggaagtgacgccgaaatgcatgctggtccgaatggtccggccacgtgcaagaatatacctatttttttcgatcccgggttgaatcagcgacgaatgttcccatgcagagacgcaccgtctgccgcgcggaagccagtcatcaagcgagatcgaggcagcttgtactgccctcgctttcaatcagctggttaaggcccaggtctctcgctccaattctgtagtagtattgggacgaagctggcatcgtcacatcgccatcgccatcgccagtcgactagatagctgaaacgctctttcggaagcaaaacggtcaacaatatacttccgacgcgcccacctaaccaactaacgactgatctacatcgtgacctcgcggttgacgagtggttttcgatacgacgacgacgagctctggagagtttgtttcgtagaatgtgcagtgggtcacgaggcatcgtccagtgaagtatatgttgtacggttcaatgctctagcgtgcggtttcgtggcgtcggggaacgggttgtggacagtcgctgtgttgaaagctgaatcatccaggaatgcgcgaacgatggcagggcaaaacattttcggattttcgtgaatagaggatgcatgaacatcgcattcgacaagggagtctcgtttgaacagcaggtgaagctacggtttgaggcagaacgaggtggctaaaggctgaagatccttgaatgggctaacccgccgtcgacccttgaaagcacgagccggcctccagcgcgagaacaacaaaacaaacaacaagctacaggcaccctcggagctcaagatcgtaacccttcgttgttatacaaaacacacgacccaaccacttgtcactcgcctgccaacactcgtcacccgtgggcaaatcgactaccggcaacttgcacggtatgagccactttgatgccctgcctgactggcctggacctacaacggcagaagctggacctagcaggctcaccgcgttgttgactcccggtaggacgacctcgtcgacccgaacggtcaacctctcggtcgaagaaaagaggctcaaggccgccaccgagctcgtcgacaatgacgatctgctcgtctacctcttgctcgacacgttgacctcgtcacgtcgacgactcggagcccattaccagaatcaaagctgggccacgcgaccggtcgatcgaggaggagactcgatccgcccgctcaagatcctacaagagaccgtctgtcaaggtcgtttcgatcgagccgatcgggacaagctcttgagacttcctctcgtctcatctcactttcaaacgaaaagcaaacccgctcaggatcgtttcgcagcccacctcgaacggtacatacggttgtaccatccgacctcgcgtatcgagatcctaccgaccgctcggtacggcgctgttaccggcaaggaggagctggcggtctatgctacggtaccgctggtaccctctgctacgaccttggacgaatgcgagggcatgttggcggccatgccagtctcgtgggatcaagaattcgaacgcgaagccgaagaggacgggacatggatccgcgactcgtcgtcatcgtccgtgaccaacgtgtcttgtgccatcgacccgtgctctcccggacccgatctagaaatgccttctccttctcccgcaccgaaccctgccacgccatcctcgtccacctcgtcgtcatccaccgtcgcacgcaaatcgaaacgcggcttttccatcgtcgaatccgcccgacacggcccatgcatgtatcttggtccaggtcgcttcgtcaaccacgactgcgatccgaattgccaactcaccgccaagagtgggatgagtatgaccttcaaggtcgtccgtgagatccaggtcggggaagaattgacgacgttttatggacccaattatttcggcctaggcaattgcgagtgtctatgtgcgacctgcgagagccggggtgaggggtggtacgctcaaaagatcgacactagctacattccggcgatgagttcactcgaacctgtcctcccgaccgattcggcctcgaccgattcggcctcgacctcgcgagccaaaagggaagccgccgacaaatgccgcaccttgaccgccgggttgtatcgacacaaacccagaaaggccgacagactcgcactactcaagatgaagaacggtgcagggtctagctctaccgtcacattcggctcggcacccccgctggactcttccgagacgactcgttgcgaatggtgcttgaccgccatgtcggtgcctctgggacacggacgtaataagctcaggtcgtcatcttgtcggaggcgagtctcgtcgggtcctgcccattcacacgtcaatgctgatccgcccgtctacgctttgacagatgtcaccgacactggaagatattccatctcccctggccggccaggacgactccggcggtcccctcttaccctcccaaatcgctgcggcccgcctggtggaaacctattgctcatcagatccccatgggtgtcatcgcctcgcgtgtaatccgcacggccatccacgttcgaggaggtagctttgtaccccttccagagccgacgcctgaacccgtggtcgtcatttctcgcaaaaagggcagaggcaaagccaaagccaaggccgagagtgccgctgccaattcggtggaaccggtggctgccacgtctacaccggggccacccattgaaccctcgagcaaagccgagacccccgccccgcaatctcaaacgcgcgaggaacgagccaatttgaagaagggtagcggattgtggaaaaagtgggaatgggccgaggtcgagacgacgacgtttgtgccggtggtcctgcccgagggatccaaacgaagtcggcgcggcgggtcccagacggcaacgaccacacgtacatcgggaaggaaatcatcgactcgagcggcggtccgtactcgtattcggcgcgaaaccgcttcgccaagtggcgaaatgggcacgccgtcgaacaaacgtcggcatccaccatcgagccccgagtctgatgcctcggataacgtcctcccggctcgtcaccgaaaacatcgacgcatcgcccacagcgttgggttggaggagagcgtcgacgtcgccgtacaagacccggtcgataacgacgaggtcatcgcgatcaaaacagagataggtcagagcccgtgggacgcgtccaacagttatcaagatggacaagagatcatcgtcttgtctgacgattcggatgtcgaaacggagcaagcgtccgaatggtccgttttgactggcgaagctgccgaaacccaggccgtgctggcgctgatcggagagagaaatcgcgaaggggaagcgttcaggcgtcgaatgcaaacttgatgtggggatcctcaggtcagaccggtgggataagaccgatgtgaggtacaggagcatcatcatacattactatactacgaggccaacgtggcacataattcatgctacaatccacacgcaaacattacggtctgattcgtattttcgctacaagtcgtcgattcgatgatggcgccgtctcaacggcgtttgcatcagttgacccgctgcgtgaaaaagactctggtgtcagtttcggatagctccaaggcaccccgatgcacacgctcgcactcacgatatcctgtgtcacgcttccgtacgtagcatcccagatatctccaaaatagctgcctcgctgcaaccacggatacttgtcccccgcactaggcatgttaccgcgtgccttgagcaggtacgtcgactgcatcttcatgaacggcaactgcttcatgccgttatctcgtggcacgaccggcgtgacggacctctgacctgattccttcagtcgggccatcagtcgggtcaacgtcttggccgcgacgtcggcgccgagggtccaggaagcgttggtgtagccgatgacggcgatgacgttgggcacgtccgagatcatgcatcccttccataacatctggtccggaatcgatacgggtgcaccgtcgatcgacatgggtgcacctcccccgatcaagagcttcaatccggtagccgtgacaatcacgtcgacctcgagtgtcgattcgggctgatctttgattttgatcgtgtcctcggagatgttgtcaatgtgtcccgtgatgatgttggccttgccttcgcgaagtgcggtgaaaaagtcaccatcgggacaggcacacagacgttggtcccagggattgtatttgggagcgaaatgcggctcgactccgatggatttgggtagttgcttcttggctccgctgtacaacagctgcctggcctttttcggaaacgtctggcagaacgtgaagaataggtagctgatgagcaagtacttgatccgcaagagcctgttcgcccagctcgtgggcaaccatcgtttgagcacgtcggcactcgtatcccggctgggtacggcgctgatgtaggatggactacgttgaatgatcgtcaccgactttgtcttttcggcaatgacagggaggatggtgatggccgtagcaccacttccgatgatggccacgcgtttgcccgtgaggtcgagatcttcgggccagaattgggggtgcacgatcttgcccttgaagttgtccagtcccgggatgacggctggcaaggctcgctcgtagtcgtagtaacccgtgccgaggacgacccagcgagcgtgttgtacgacattccgatcgtccaccttgaagttgagcgtccacagttgatcctcgctggaccaatcgagcgagacgagcttgtgaccgagtctcaacttcttgtcgcctccgaaagacctcaacgactggtgaatatagtcgaggatctgcggtgcttcggcgatgaccttgtccgacttccaagggttccactcgaacccgaaggagaatagatcggaatcggacctaagcccgggatacttgaaaaaggaccacgtgcccccgatttcttgcctgccttcaaagatggcatatcgggtcgagggggctgcttcttggacccgatacgccgtgttgatgccagagatgccggctccgacgatgaccaggtcgagaatctcgttgtcgtcattgcgtcgtcccatgattggcgtgagaactgtgcgatgtgcgtgacgatggacgaggtgtcgatgggagattgggtcgttttagctgaggtcagggaagagctagacgatcgcctttatatcctcgactatcgagtattccggtaatgaccagtgcaggtatcaatcgataattcccgcctcctgaccggataacaagctattcccagatcgaggtggacgggtctatattcgatccgaccccgacgacgttaatgttgacggcgacggcgaccagagtcaacgaggtcgaggcgacgacgacggcgaggtcccgattaaccggaaactcgttttagcgcgcgtccgaaacccgggctcgggctcacaatgaccgatcgaccaagccatgcaagacatgaggatggatttaaaagagatcatgccatgtcatgtcctgttgatacttagccggagaccatatatcctgatgatacagccgaacgggatcaaatgaccagacggtacgttgatcttcgatctcgtattaaccgtacggagacaaagtgccgcatatctccaactccatatagctcaagaggacgctcatatcgccagtagccgggttgaataaccgacgacgcttcgctcccagattatatgtagccaccttgcgggtccggctgtctcgatcactgtacaaacggtctctcagaagtcaaccgttcaaactctctcactcacctaaagatgatcaccactatcgccgccggatccattctttacctcttggctcgctgcccgcctgctctggaaccctacgtcggacgcctgctcggccatctacccgcccgtctcgctcgaccccttttaattaccctcttcaagaccttgttctcgatcggcctcgtgcataaaatcagctcaactctgagctcggtggcgctcaacaactggcggtggacgagcgaccgcgaacggtgggattggccgaacgagatcgccgtcgttactggtggatgtagcgggatcggggaagagatcgtcaggtcgctcgctaggaacggcatcaaggtcgtcgtactagatatccaagaccagcccgagaggcttaaaaagggtaagctgcgaacccagctctcgcaagctggtcggggtctcatttcccggtcttgcgccacacgtcaacagacatcgcgttgtacgttcgctgcgacgtcaccgaccccgaatccgtccagtctgcggccgcgacgatcaagaaacaactcggctcctccccctcgatcctcgtcaacaacgccgggatcggtcacgactttcccatgttcgatccgcccatgcaacgtgtgaagaaactcatcgacgtgaacctcaccagtcactggatcacctgcgccgctttttgccctgacatggtagccaacaacaagggtcacattgtcgagctcgctagtatgagcagtttcgtcagcgttggcaggttctcggactactcggctaccaaggccgccatcgtcagctttagcgagagtgagcacgagcacgcgtgcagtttcgattcgatgctcgacctacacccgatttgcttatatctgacatgatgacaggcctacgtgaccagctgagacgatggtacaacgcccccgacgttcacgtcacttgcgtccacccgctatgggtgtcaactccgctcgtagcctatcgcaagaccgagatcgaacgcgcctcgggaccgatgatgacgcctgccagggtcggtcaggagattgtcgaccagattttgcgatgcaaggggtcgaggttgatcatccccggcgggttctcgtggctcaggacgacgagagcgtggcccgtatggatgctggacgcgctcaaaaagtcgaacggattggatgcagctcagtgaatggggcggttccatgatacgagtcgtctagtatggtgtgtcatagtatcgtcggaggtgttgtacatatattctcgggtcatcacaatcgtcttctacagtcgtgactcaaggtgatacgcaactagtactaatctgattgggtgcaaggattagatcaaaccccgatttcaatgacacgtcatttctgagccgtgatgacctggtttggtcacgtcaatttatcaaaataacaacaacatcacactactactactactagttactggagttcagtcgacctggtcgtcctgacgacccattcgagactgggcacgatggcttcgttccaccaatcttgatcctcaggccaagtgtctcttgcagcctcggccattccgtgaggcataccctttgcctcgaagtaactaacatcgaccccggctttcttcatcttctcgaccaggtcgtacgaatcggccggcgggatgagctgatcccccgtcgctacgacaaccattgtcggcgggaaacgaccatcgacgacgtccatcgggttgagatcccgagggtacggcgagtcttgaccacacagccaggtattgagcgtcttggttctcatcgtcgccctggcccagatgattcgggcatcactggaggtcatgaatgtctgtcgtctgtaaaggtgggtgtgaacagtccactagatgcgcttgcctcccagctcgggctccggacaggctcacttgataggatagttcgtgcaaacgggctgggccaataatttggtgaggtcggccttttcctcatcgctcgcctggtccaagaacgcctgcatgggttcgttccatcctcgttcattgtccgtcttggggtaagtcggcaagatcgctcgaggtcgagtcagaccgtgacggagaatggcatcggtctaagggaattcaatcgcaatatcagcatgacgtgtcaccaggctagctgccatcacgctttacggaccaacagcaacgttccggtaccacccgcactccaccccatcacgcaagtcctgctcgtatccaattcgacatcgagcgcaccgttcatgtcgttcgtcgtccaacggtaggcatcaagcaggtcttccacacaatcacgtagcgtgacatgcggtgccagacgatactcgggcgagacgacggcaaatccttcgtccagcagataattgatctgatcgggaggaagatgaccgctgcctccgatcgtccaggcaccaccgtggatcatcattgctacaatcagccggtcccgtcagtgttaggcaaatcatacacaggttcagcatgataaccgcactgacctatcggcgcaccgctcgtggtcttgggtagaaacacatcgatgtgacatccaccagtctcgctgttctcgatgggtttgaacagaaggcgccggtgaggttccagccgtttcgtttctttagtctgatccatgattgctcgcttgactgcataacaagaggtggggacattgtttcgatgtctactcatgggctcgatattatgagctatatgtctagcagcctcgagcggcgatcaagctgatagtcgtcaggttcgcctgatggacggatacactgactactgcgagtgcggcaattgtcgtgccgaagcggggcaccccgaagcggggcaccccgaagcggaatcaaatcgatccactattattgtgccgaaactccgagaggccgttgtgggtctgggggccgggacttgcaccggtcgagtcgaatcgtatgatgcacatgtgattattcatctgatccggcttccactacccgtccgctttttccggggacggcactgtcctgggcgatatcaccgcgtggtcggcctcaacaaattcaccgccgtatcctgcaagtcttgcgacaactcgacgaccgtgtcttctagcccgtctgccagcttgactacactatcgctcgcactagtcacggtatgatcgaacgagcctacgatcgtatcaacaacggtatcgtcggacccggtcccagacgcgttgcggtcgttttcagacccgcttcctgtcggagttcaattacgttagtctcgaaacgcgggtcgagttgacgggagaggacccgccattggcattgttcgaaccagcatccacgccagcgttatcgaagcccgagttcatcccgttgcctggaaaggaacgagccacatcagaatctgaatcacttcctttgacacaacgcacaatgctcaccgcttaaaacgtcgcctgccgagttgccgttcccgttgtttgataatacatcgttgtcgttgagcaaagacacatccggtagctcgaccagagcgcgaggtgcccgggctggagcaccgctcgcgatgccgatgaccatggccgtgaaaaccagaaaccaagcctgaagtatcattggaagattcggacagcagacaaagctgtgacgatgcagatcagaggaaagtaaatggatgggcaagcgacacgatcatatattactgttcaggatagctcgagcctgaatcacaaccgggttgcgtccctgattccagctccatgacctggatctcggagatggactcattaacgagcgctgaagcgagtctcggctagggatcgcaaggtaataataccgccaaatgaatcaatcgctgcttcgaaaagcttgcccgaagccaagcgcggaatactgctgtagcgcccgtggctgacgtgtatcgacataaaaatggttcagggtaaatttgtcctactcgtcggctcgacatgtcaagtccgagatcgtattcgctacagtgatgatagttctttcttctcgatgaattgcatgtggaatttgctatttcctactgtttctttccgaacaaagtctcccagattccggtgagcgcgttggaagcctcgttaccagacccagtcccgttcgcgttgccgtcgttgtcactcccggcccaattcgcattgtctgcggtcgtggggtagtcagcaagtcattcagcaagtcccattgcatctcgcagactcactagaccctgcgccagctccggccccatcgaaaccgctgttctgaccgttgctgctgcccacgtctccgatggtgttgccgttaccattgtcacttcctgcatttggaagggttgccttagcctctctcacatcttcgcggccgtgagaaatggtactgaccgatactgttccccgacaacaagtcgagtccggggagcccttgaggagcagcggtaaccgcaacagccagaggcgcgaggagggcgatggtcgagaaacgcatgtcgagagatcgagcggtagattcaggggtgaaagaagatgagattaagtttgccttcttcaacgatctggaatcgatcccttcttaactctaggcatcggtgaaggcttatatagccaatcccacctcgactcctcggccattcctgttactttgtcaaagcaacgtcgtcaatgcccgactcgcatagaggctagcgcaatgatatagcgaacgccttctcaaaatcaatataatgcagcccgtattatatgggagctagttcttagcggttccccatcaagccgacgttgcccgacatatctctaacgatggttcgtcgcgaacgaacatgacgtgagcactttggtattccagcgcgctcgatcgcctagccttagcgcctgtttcgacaagcgattgatttctcggttcaagaaacgatgccggattcgaaccatgaccggcaatctactcacatgggcaaaggcgtcccgagtggtgcgatcttggctgcaaccatcgtcactgcctgaggctggtcgcgtctgccaagtctttggttcattcaatggccttcgaacgcagccggggatatgactcgcgctttgttcgcaagtcttttaaatcaacgagtaatcgttcttgtatcgttatgagaggaacgctatcgcagaatacacggaccgccctgcaattgtagctcacagtgaagaagcctatggttgatctctatcatcgatgtgctttttgttccgaaaatcgcacgggtctgcatttcggcttcgtgcttgaccgcaacacgtatgatttctgtgggaaacgatgacaagcccttatgaccaagcagcgaagtgaatagacagtgtttgcctcgcgcgaacctgcatcccatctagttgcacagggactgtcgacggtcgtgtccagccatcttacgaaaggtctaacccgtaatcacgaaagtagtgcgcttgttgaaagagactccgaggtgggttcgagtcggatcgtgtctaagcgtgaacaaacgacgacacgtcgggcggacgcataacctggagcctcgctcatccgcctggctgatcctggtcggtggccgccagcgtctaggtcatcccttgttcttcaatcttgcttgaacttgatacctcgatcggagttgaccgatgacatcactgaggttcaaaaacgacatcatcattcgacgacgagtctcacctcaaacctgtctcgtcttcccccattcagtgatgtagttctaattttggaacgatgattgatatgctcagaggagaggacgatgatggcgaaacaaacatccttcaaccaccaacaatcacgactacgtcgacctgcaacgacatacctgtgcaatagcagcccgacgtcacacaagcttcaactcgtcgtgacatagtgaaaccacttgacggaacctgatcgcaaccacaaggcacaggcagcagcagcaagacctttgcgatttctcttggcgaccttggcaaccaataaacatcgccaaaagccatcacgatgaaaccgccttccgaatctccagtcgccatcgaccataatgccgagcacgatcttgcccctgctgcgacgagtagcagtactactgcatccccgctcgccgtcaacacccgactcccccccagcgtctctcggacgtcgagccgcgaccgccatggacacggcgaccacccgcatcgtaaaccttcgagcgtgatcaagcgaatgaccacgggactcttcacgcccgaacgaaagattcgcaagagtcccgggtggaagcattcgtttgtcaatttggccaagagcagttggatcaacctcttgctcgtatttatccccgtctcgtacgtcgctcacctcggggtgtcctttcatccgtcggtttaacatgttcagctgtatcgacagatgggctctccacttcgctctcgaaggcaagggacaagacactctcatctttgtcatgtgtttcctcgccatcatcccgctcgcaagttttgcctttttttcatttgttcagaaaatgtgcgtcgtagctgaacctcatctggctcacgtgcttgtcataggccgggttgctgggttatactaccgaaaacgtgaccatgtggacatctcagacgatcggcggtctcttgaacgctaccctggggaacatggtcgaggtaggtcttgcgcaaagcgagaaacgaatcgtggctgtgccgagctgatcagacggttctggtccgattgcaatagcttatcggtaagtagtcgcgtcctgatcaagatctcattcgacgccgctcacctgcatcccatccactcacctagtctccatcatcgccctgatcaagtgcgagttgcaggtcgtgcaaagtagcttgatcggaagcattctcagtaacttgctgcttgtctgcggaatgagctttttccttggcaagtcggatcgagccctttgacccgacgccacggctgacgagacgacttttaggcggtactcgattcgccgaacaacagttccaagctactagctcgcaactcaactcgtctcttctgctcatgtcggtcatctcggtgcttatcccggcggcgtttcactttaccatcaactcggcctcgaacaactcgaccgaggtgatcctcacggacaaccaggaaaaggttgacatccttgccatgtcccatggtgtcgccatcatcctgcttctactctacgtcgcctatctcgtgttccagctcttcacccacgccgacctctacgccgacgaagagggtcctaccaagagcacgacctaccctgccgaagtctccaactacccgacccaactcaaggaaaaactggccacgccgatccgacgaagggctgaagccgggcgtcctcccgagatggtcggaggtacgatccaccacgcgatcgctcacgttcatggcacgtccagtgcattggaaaagaggcccggcatgaaagtcgaccgggaaggcaggatcacaagctggggaccgaacggtccgcccgagggacacgatatcgaattggctggtgaagaggaagagggtgaagaacccgagatgagttgggaggcggctttgatctcgatgatcatcatcaccgtgctcgttggagtcacggccgagtttgtaagtttgatcgatcgcgcataagcagggcgggatatgtcgactgactgccggtccgacagctcgtgagctctatcaatggcttggtcgatgccaaccccagcttgtcccaagaatgggtcggtctgattctgcttcccatcgtgagccgttcgagtcatcgtcaagggtgtagataaatactaacagtgctgccgtgggcaaaccatggacaggttggaaacgctgctgcaagtctagagatctgtccgcctcgaaatcgccccagactgacacgaatatgccttcacaggaacattggaccgctgttatgggagcctacaaggacaaactcgacctgtcgatctcggttgctgttggatcttcgatccagattgcgtgagtctatgaataccccgccagtcgattctttttggaaattgacaaagacaaacacgacagcctctttgtcattcccttctcggtcattctgggatggattattggcaagcccttgttgtgagtcgcggtagccgttgcccaaggtcgtgtccaccgacaatttgccgcctcacaggatgctattcgacccgttcgaaagcgcagtacttttccttgccgtaatcatcgtcaaccaaggtcagttccatagctggtagaaatgcacccatcgggcactgatgagcttgtttcatagcccttgccgacggtcgaaccaattggatgcaagtttaaaacagtctgttctacctccctcgaacagccatgctgacggtctcgatttcaacttcgcagggaaggattgatcctcttcatggtatacgtcctcatcgccgtagctttctgggtaagcctggacaaccctccccactgagagatccgcgtcctaaacttttcgccatctacagtactaccctggtagcaacaccgcgaaccttatcggccaggctggatgttcgtaactttggccctaatatccgcccgtatacccttgcccgatactttgtaccaccaatccgtttgttctcccgcctacccctttgttgagcgtcgagtctttcatacatgaatatgacgtcgatgtgcctgaaaagcgctggcactaaagtgcgagcctggttgtgtgacctatgactgctgtgtgaccaccgaccaaggatgagacgagcgtaaccaccaagaacagtctatcgcccatcgcagtaatcatccatcttagctagaggggacattctcaaaccctcagccaatgcgtctcgtcgggagacgccgctctgaaggaattttacatcctttccgtcacccaccactgaaggtttgggttcgatctcgatatttcatgccattcaaatagaaaacgatctgattactacttgcctcggcttgataggctgcaaggatagaagacgtcattgtacgatgaagaataccccgttgaatatttggatcggcgggaagagatccgtcaaaaaatgatcttttgcgtgataggagatacaactcgtttctctgctagactagatcttggtcatgtcgacgacacatcggatacagcttccagactgtgatacgcggcgcccatcgacatcagtgacctagccttctctcaccgcgaaacattgcgcgccgacggggactcacgtgcatgtcatcgaacccttcgttgatctccttgaggtcacggtggtgggtgacaaactcgtcgacccagagcttgccgttcatgtagtctatgatattggagcaataggttgagaacgaccgatgattacatctggcctcggttgtatgctcacctccgacgatgccgggcaattcggtccgtcccttgacgccaccaaaggcggatcctcgccagacacgaccggtgacctgcatagtagggcgtagcgggtcagttcgtcatcccactcgtcgcggctggctacatcgaccagaaactgaccagctggaatctattcagaacaaagcacagcaggcgggaaagcgccgtaattcaacataactccatcccgaacgctcgcttcggagactcacggcctggtcgaaatttccgcaccggcgggagcgacgccgatgacgacgctctccccccaacccttgtgacacgcctcgagcgcagacctcatgaccttgacgttacccgtagcgtcaaacgtgaaatccgcacctccgtcggtcatctcgacgatcttgtcgacgatcgaagtaccctcggggagctcggtcgggttgatgaaatccgtggcgccgaatttgagggcgaggtcctttttcccgctgttggtatcgatggcgatgaccttgctgcagttcttggctcgggcgccttgcaagatggacaatccgacacatccgataccaaagatggccacctgggagttttctaacgagacggggcggtgcgacgtcgacgtcgacgtcagcgatgcgtccgccaaccctgccgtgtgatcagacgctcaccgatgccgttcaacttggtgatggctccatatccggtggtgatcccacatcccaacagacaagccttgtccaggggagccttttcatcgacggcgacgacgctgacgtcggcgaggacggtgtactgggagaaagtcgaagttcccataaagtgcttgatggactgccccttgcaggtaaatcggctggtcttgtcgggcatcaatccttgaccctgggtggcgcggactagagctccaggtcaactcgcgtcgttttgtggatgtggaacgacattcgacgggggctcaccggctccacaaaggttggtcttgcccgacttgcaaaacttgcattccttgcactctgttttccgtcgaggagcgggtcagccttaccacctggggagagatcgtatttcgacctcgacgtcgagcagactcaccagccgtgtagagggggatgacgtgatcaccgaccttgacgttggtcacgccctctccgacgctctctacgattccacctcctgtgtagaccgaccggatatcgacgagaacgcgaatcgaggacaagcttcagccgccatgttccggatcggatcaacctgtaaagcaagattccgggtatgactgaccttcgtggcccaagatggaggggaaggcgccctcggggtcgttacccgacaaagtgtacgcatcgctaacgaacccgacacaggccatccgagttataagtcagtggttccatgttgagccgagatagaaggtaaaaacctgcaaatgcggcggggcttacgtgtgacagattccggtactgcgaggtggtgccgttcgccaagaaaaacgcgtttaggtcgcttgtctactgggggtacatgctgccggttgtatttaaacttactagaggatcttgactcgaacttcgtgagccttgggaggtgcgacctcgacgtcctcgatggacagcggtttgcctgtcctccccgacgtcagagtgagaggatgtctgatatcagctccgagatcgtggcagaaggacgacatgtgaacgtggactgaccggcttcccaggcgatagctgccttgcaggtgatggtctacagtgtccgaataggtcgatgagggcaaggtatgcattggatttgtatggaacacaaatggggatgacgaacgcgagtagtaagccccgcatttcgtttgtaacggctcgagctgggcttacctttccttgagtgtcggacatggtgttttcccgtagattttaggtgtgagcttggttcgtcacgaatatggctgtttgagtgtgagatggcgagattcggggtaataattaaagtcgatgtcgatatgcattcgatcatgacacctggtcatggtcattgccttgggttgacagtggacgggaccgggaacctcggcatccaagattccgaaaagcggggcaagattcgattgatggggtggatgggtgcgtgagattacgtcagcgcgagtagacagcgaaagcgcaattttgaagcggagtgatttgtaagcgcatctaccttgtgccatgtgctgcgaagtcgccggtgatgaccagtgattgatgccgagatccggatacgattgcccccgctgtttcctctctctccgcccgccacgccgtcatcactctcggcatcactctcgtcatcccatcttcatcgttcgccgtctattgtgcgatttcattcaccgaactcgacccaacgaaccatctcgcatctcggtcagacagctccagctcagcagacaactggcaactgaatatcaacttcacatctttatcgtctctgacctacatcccaccccggcctactataccatctcctcgttcatttacttgcacaactaccaaaactaatactactacaagctagaaagataacaatgggtgaggcctcgcacgtcgtcatgacgcgacccgacctaccgctcacacctgatcgcagccgcttccatgatctcctccgccgtgaccagcgcgaccaaggccgctcacagcgccgtcgtctcgctcgcctcggccagtcagattcaacagggtggtgtcgtccccgacgtcaccgtcaaggtcaactcgcccaccgagaccttgaacttttcaaagttgaccggcaagaacgtcgtcgtcgtcgtccccgccgctttcagccctagctgcagcgagatcgtcagtccgacgccgaccgctcgctcgagtggctcctgtcatcattttttcgcaaactgacccgaacgaccatgccccgttcataaccctctcgcagcaagtccccgagtacatctcgcgatacgcggaattcacctccaagggcgtcaaggacatttacgtcttgtccgtcaacgacatctttgtcatgaaggcttggaagaaggatctcgtcagcaaggccgagggtgatgataccaagatcatctttggtacgtcccgggctcgggttgtcatctcggaggactgcagctgatctacctcgacccgacctttcctactatccaaattgtatcaacgacatcgcgaccgcgacgacagtcgccgacgacaccgcctcgttcgcatccgctaccggactcgtattcgacgcctcgtccttgctcggaggaccccgggccaagcgtgccgctatcgtcattgtcagtccaccatcttccgtctccccttgtcgttccgcgatggctaggtcgacgaaactgatctcgcgctggttacatgaacgaaaccccctcctcttgctctggtcaatcccaatcatcgcgtcgtcgattcgatacctcactctggctttgtaggaggacggcaaggtcctccacgtcgctgtcgaggacgagcctcctcaggtcaccgtctcctcggccgactcggtcctcaaggctctctgaatcggccgggatacccagactgtcgatgagaagagcaggttgtgagggaggtacgccgggtatccgaattccgaggtgcacggaggtttagctagatgcagatgttccttatgatggaaaagagcgcatattcatgtcttgaacgatctcaaagtcgttgggtgcgggaatgacggtctacggtttcgtgcggtggcaacccctgtcctctcgacgtggcgcttgatgtcgagacgagatcggttttcaaacgctatacagatcaggcggagaggctctcgagcctgtgccttttcacacgggcgccatgttcgaccgggtgaagattcggtccgaatcctgccacgtctttggcttgcgtcaggaaacgtctccctcgcgtcttgttcgcgtgatcgtaaaggctgggatgatccgagggggggctgatcgtcccgcacaagatcgagtgtctgcctgtggacgacggcacgactgcagtctcgaagcttccagaacgcccggtaggggaccagctcgataggcggaggacaggtgcgagcgattctgcgagcctgtcaaatgtatgccgatgatccttcgctcatgtatcggcgcagggaccgcttatttcttggtcagatcgcacatccgtgaaccttgccgctactttatcgtcgagtggtctcggcaaatcgacacgatagcctgtgtccagcaggaagtaccgggtggttcaggtcctccttatgtgaaccgtctcttgggtaccttgccgagcggatctaccctcgctgctttcgtaccgtttgcgaggcatttcttcctgcacagaacaggaagtcatctcctgtacgatgatgtgtgtcaatcgattgcgcctctacaaaagtggcttcaagtgtcctcttgtgtaaacaagacctcgccacgatgacgggtctcaggtttatctctacgtccatcataaaagggaacgtcggtttctggtgggcgaggtggtccaccattcagatatatagctattccaggcttaacggtggggagaatggtcgagatacccctcgcttatcggaatgaatttcaggtttggcaaagcaagagacgctaggcaacgcaacaaccatatgcagggataaattggactacgggacaacagtggcacgcagagaaacatgggatcacggtcatgggtttgcgccgtactgaaactcgcctacgatatacataacaatcgatcgttttgaagacgtcacgaagccagactgttacggcggccgcgtcagggacgatacattattgttcacgcctcacgtcgaaaccacatcatcgattcccacacgatcgatcgagatgtacttctctcaactcgtccgtcccgttcgatctgaatcgtgagtacacacaataatgttccggcaaagggtggtggctcgaattcgtgtgaaacgcggtgtgtggtccggcccggtgtacgttgtctctctctccccttccgccgctttacgtcactctcggtcgatttctccccgcgatctctacttcgatcgatgacgatgggacggacacacacgatcgacgaacgaccacgactcgctatacaaacaacttgaccctcgtatcgacctcgtccaccatctcttcacctccatgccaaaaacgggaccaacgctagaatccctgcatgaaccacgtctcgaatttctcgagatccgccctacgacgcaacccttcgaccaccgcctacacgacaagacgaacgatgaccaactttgccggcatgatcggaggacgacctggatgggtcaacttgttcgaggatcagctcaaggaggatcccagcgccaagtgtgagtctcgccggtctgatactctagacatgcaacgctcgaacatgcaccgaccaccctccttgcctgccttgcctcgcagcctacccgttctccacctactcgaccgcggaccaagccccgaaagtccgctatgtcgtgcaccgatccctcacctcgaaatccaacctgctcttaacgtcgacggaccatcgtatgaaaaagtacgacgagctcggttcgaaccccaacgtcgagttggcgttctggatggagaagaccggtgttcaattccgaatctctggcaaggcggccgtcctgcccaacagacccgagtccaagtccgagctcgaagagatcctgaaatccaccttgtccgtgaccgagggggaagaggccgatcccgaattttgggtcaagaagcgtgatgaagagtttgaaaagatgagcgggcatctccgagcgacgtttgccaggcctaaaccgggtacgccgttgaacgagctgccggagaaggagcaacccgaggactggcccgagaccatcaagcctcctggcaaggacgtgagtgtcgtggtcattgcgaactagtcaatcttcgatgttactgacgatcctcgactcttcacttgatccccgtggcaggacaagaccaaggccgagctcgcgcgtgccaatgacaattaccacctcgtcgccatctctccctcgagcgtcgagatgctcgagctcaaggcgatccccaacaggaggactgtatggcacaagcagggaggtcagaacgagtggaccgtggtcagcgtggcaccttaaagatggtcccgagacttggggcgtgtacgagttgtggttgtatgttaacgcgaaatgtattcccgttcgatccggggcgtgtgctccggacctcaaactttgcaggtctcaatacaagtatcctacgaccgacaccttgctgcaactggcactctaaactgacgttctatcgaggtaaagagtggatatcgaatcacaagacagcagcatatctctccaacatatgctcttgttgcgctcttcactttctcttgtttccaccttgaagacgtcactttccctcgtcgtcgatcgatcgagatcgactcgcaaaacagctcaaaagaggtcaattggacgtgtttggtcaggtcaaatgacccaagatctagagacatctaacagagcttaagaatctgacgtcgaccatgtccatacgaagagcaagagcattgcctctgcatggcctgtcgcggaacgtaacgacgagccgatcctggaccccagcgagctcacggatcgctcacactcccacccgaacgcttcatcgatctgccatccggctcgactcgaagcaggagaccagcaatgtcggcgctgccaaggatctctcggagttgactccagaggaggtccagtcggcatcggcagagttgcaatccaccgacttgctagacgtttacaacagtctcgtagctcggggtttgatcgtatgggacgccgagcaggtccgatgcgtgatggaggtcagtcccgcgatcgctcggtgactcctgcttcagggttcccgaattgacactgttcttgaactttcgtcgcagcttcggaaactatacgacgagctcaaggattacactccgccgctcgatctccttcgacgattgagcccggacgcacccgtcctcgcccggaggttgagagaatccgccagtaaagattcttggtggaacaagatgcgcaaggggaatcgagctcccgagtccaaggatgagagggaacgagctttggtcagggtcttgagcggggaagaagagctcgccgagctggatgtgcccaaggtgagtctttggaatggttgacctttgcccctaagcaaccccgctaacccatgaattcgtacccctcagggaatcctcgtcaccggtcctcctggaacgggaaaatcccacctcctctccctcttctacacgttactccctacccaggccaaatctcgacaacactaccacccactcctcctctcgctctaccaagccgtctggcgtcggacccaagcgcggatgagcgcgatcaccccggtcaagcgtgaagagaacatggagagcgcgggcaaggacggatggaagtccgtctttgcgggaggagcttttgctgggcaggataccgagggttctgcgggtcagggggcaacggggatgaagatgtcgggggaggaacagagggaagggatctcgttcgggatcgccagggatatgatcttggagtatcacatcctgtagtgagtcccggtcttgcgacacgacatcgcgcttgcaggaaagacgctgatcccggcgctcacattgcagctttgacgagttgcagctagtggatgctacatcggcggccatgctacgtgacgtgctcagctggtactggcgaatgggcggtatcatcatcgctacctctgtgagtctatcattgcgtttctcgccttcgtccagtgcggaggatgcttatttcaccgctcctagaaccgacttcccgacgacctttaccatcatggcgttcaaaaagaccgtatgaactcgttcctcgaggccctgaaagccaggtgcacggtttacgaattgaatggcggtcgagactggaggctgggtcgggacgaagatttcgatacagaggggaccgacgcggaaaaggccatggcggcgacgaacaagcggaggacgtggttcggttggggtgacgaggagaggcagggtttcgagcaggccgtcgaggctgtcactcagggtcgtcaaggtgcgtcagaagcggctcgatcgcgatccatatatctcgctcatgctacgccgtccgtctggaactcaggctcgccctcgtctgtcaacgtctacggtcgtaaagtcaagatcccttgggcggtagacaaaatcgccaagttcacattcgccgacctgtgtgaggaagctctggggacggcggattacattacgatcgcctccaattttgagacgatcattatcgacgagacgccttacatgtacctccgacacaagaatcaggcccgaagattgatcaacttggtggacgccctctgtgagcgcgaccgacgccttgtcaatccatcctgatgctgatgtagtctaccctcagacgagagcaagtgcaagattatcgtctcggcagaagcgggcccagaagaccttttcttccccgacgccctcaatgaagcagcacgagagaccaacgacgaggtcatggcgcaggaagctctttcagacgccgtcgccgcgccgttcagacccaacatctcatcctatgccgagcccgaggagcaacagcccgcgcaagataggcaaggggatgcggcgaggatgttccagaggagggagccaaagtctcatcctagcgaggagacgacgccggcgttcaagacgttgtccatctttaccggcgagtcccggttcgcatcgggtatcgattagaacaggcgctgacatgcaattacatttgccccatttaggcgaggatgagcggttcgcatatgtaagtactcgagcggatgaacgaggatacgcagaactgttcgctgacttgcttgaggcatccgcctagaaacgagccgtttctcgtcttatcgagatgacccggagcccaacttatgctcaagaggaatggctgcccctgcaagaatcacatcgacgatgggagaaagtcgccctctcggtgcctcccgtatggcgtccactgacaggctcgatgaacatggcaaagccatcacccgcaccaggggcatcaaccaataatcctgccgatcgcgactcgagcgatttcgcagacgaggcggggtactcgagacctgaaaccttgggacccaagatttctcgcgatcctcccaagatttcggaagaccacatgtggggggtgcgcgacgactggggcaaaaaggcgggtgattggggtcaaggtgtcaagggaaagagatcccccaagaaggatgaggacgacaagtagtggatgtagatggacgtagaacaatgtcaagcaaatgagacggttgtagagtagttcatcatgaaaggttgatcggtcgatggattcggcggaagctaatttcaagatttccctgtcgatcctcaaagggtcgcaagtcgcaagtcgatgatgatgatctttcaaacactctcggcttggccttgactatctggaacgaaaacagagcagcgcctgagagccagtagtagtcaccgcatgattcggacaggcattccagccgagctgcgtcgttggccgttgcgggtcccgacgggactgcggcagacccgacaaagacactcttatcctaaaagcctcgatatcccgctcgacatcccggtggaatcactcgtcgtccccagacatgcaagactaccgaaatcggacaagaagataaaggcgaaagctcaccctgtcgtcttctcgaccgtccagccttctgggacgagacccatccaggagactccacgaccatgtcggcgactctctctttatcctaaactctacagtctcctggcagaagtaggtagcaaggaacactctttcgaaaccatccttcaggctttcaacgagcacatcgacgagttggtcgctcttcgaccgctcgtcatcaaggcaggaaacacggaacagcaacacttcggtagcgtcgtgggtctcaaatccatgcaaccgtctctgacctcggaatcagcgtctacctcaatagacaggcaagaagcacgatctatcccgagaggaagacgggccctccttagcaaagaattcaaccggatcgatttctgcctacaggccatactccgccatcctcacggcttgacggctgggaaggccattttcgaccgactgctcgaagaaggaatcgtgcccggtcaggagagcatgaccatggtgctcaaggggacgatcagtcaactcaagacccagagcgagacgtctggatcgcatgatctatcatccgctcagagactctgccggacgttgctcgagcgcgtaccctacgcagactcgcacctgttcaacctgatcgcttcgcttcagatcgtttctgggaccccttcgatcgaggtggtcaagctggtcgggaaccacatgacactcgaggggaaaatgtccacggcaacgtggatccctcaggctttcgacttgatcatgcgggcatatcgtcgggacggagatatcaagggcgtgatgcggtggtttgccctgtatacagagtccagggctcatcagaagcggcagcaagaagctctcggatccacgtccggctatatcgcaccacctcaggcggacttgcgggccagagtttggccgtacatcaccatgctgcatgcgaacgctgacgctcgatcgtctcggcgcgcattgcgaaaaggggcgtacgtccctgggttggaccacgccagttctatcgtccgccagatcgtgcgggatgacctgcacgtcccatccgaagtctacggctatctcatcggtcgggccatcgtaggacgggatttcaagctcgctcgatcgctcggtgacacggctcgggaacgatcgcgagagagcgacgtggagctcggcccgttgatctggacgtactgttttcagtcactatcccagtccaaagccgaaccgggtgacgtgcgtcatctcgttcaagagatgctacagcggtccgtcccggggccttcacaccgtgaaccatcggttcaagtccgtcgcaagctctacacgtcgatcgctcaggcggctttgactggcggtcgacaggactttacgctggccctttgggcgaccgaggaatgtatgcgtcatggtatcgctatggacacccggatgatggacaccatcgttcgcgcggtactgaacgtgtcgcttgaccagactcgtaataaagcgtggatcgaggcagtcctgggcagggacgccgtcgacgccttgtgcgcttcacgtcggtcgccaagtcgataccgcaccccattccttgttcgacaacgaggcatcaagcttttgcactggaacgtcgtctcttggcggttgtaccgactgagtgtcgagttggccgagagtcaaacttcggccgctatggaccggatgatctacctcccgctcggtcgacctctggcgagattacaagaatcacccgatcctgtcgatatgcgacgactttgctcgatccgtgcgcaattgtacgattatcgttggtggaggcaaacgacgggaatcgagggaatccgttccaacgcgctggcgctcgagtcggctttgcgagagttgttgcgacgcggtgtctctgcgcagaggttgctcgcaagtcgagatggatgtgagatggcggacgtcgtgacagcagagatggacgatcttgtagagacgatgacgactcggtcagactgatgatgaatggtctctgctacctgtgtactttgacattcatgtctcggtgaattcctcgtgaccttttttaaactctgatccgagatttctcgtcgacccaacatgtttcgcaagagcatatttcttgaaatccgacctttggcctgcactttagatctcaattcaggtctttcttgagactacaactacagcaaatcttcgtcttcggctttcttcggtagctagtgtcatcaagggtcacgactattggagccatctcccgtaatgctacgctgtgctagatgcctagccggatcagcacgacatgacctggccaccgctcgatgtcgggcggcatcaacgatcgacattgctcaagctcggcgatacatctctagccaggacctcgatcgagaactgagcaagctcctcgggacgggtacatcatcttcatcaggcgctctcaacccatcaaacttggttccatcgcagaacaaatggatcaagcccaaaaaggttccccgaccgaacgccaacgatctcgctcgactcggtacgggcaataacgatcggtcgaattcctcgggccagcaggaccgacggagaggcgaagattccagatctggcagcaagaagaatgaaccacgtcctccccgaaatgacgatcggaatcagtcaccacgaacacagggcggctctcctgctcgtttcggtttgcggaaagaaggggtccccgctcgtcgaagcacaccccttgcagcgggggttgcgaacgcaaaacccatctctgaggatatcgaggacgttgtcgacgagcctattgtacaggagggagacgacgagtcgatcgctcgtcgtcgacgattgggagcggccgcacccggcgccgcggtcaatccgaagacggacaagaaatctaaaacccggggatctgtacataaactctcttccgaacctgcttacccagctcaaccgggccaaaaacgacgaaaccccagtgcagctccatcccctggaccatcgagtccaaattcgacgtccaagcagaagaaggaaaagacggtgaaaaaggtcgaacccaagttcaaggtcgagcgggaagtctacatcccgtccatctcggtcaaggtcggggatctggcgaggatggtggatgttcgattacgtgagtcacgggatgaggtgcttcctacgatggaaatactgatcgaccggtgcggatttgtagcgaatttgcagcagaggatgaggaggatgggtatgaccgaggagcaatgtcattcggacaattgtgagtccatgtccaaagtcactatcagcaccggttcgaagctcatgtccctcgatcgacgtagacctgatgagtgaggatgcgagcttagtcgtcatggagtttggcatgaatccgatcgtcgacgaagagcgaagctttgacatttaccccgagtcagtccggctgactcgccgatcatctttctggctgagcttttatgctaatctcgacacctatagtccacctgaaaccgatgcttccgtgttgcctcttcgtccccccgtggtcaccatcatgggccacgtcgaccacggcaagaccaccctcctcgactcgcttcgtcacacatcggtagcctcgggcgaagcaggtgggatcacgcaacacatcggagctttctccgtcccattggcttcgttggtcaactctgaatcgttatccgaggggggcgtcaagagcattacctttctggacacgcccggacacgctgcgtttacggggatgcgggctagaggagcatccgtgacggatatcgtcgtcctggtcgtcgccgccgatgacggggtcatgccgcagacgaaagaggtcctcgaactggtgcgaaaatccggagtcggacttgtcgtcgcgatcaacaagtgcgacaaaccaggcgtagatttcgtaagtcgccacatgcgcgtgagcttggaccgggacagctgaccatgactgtataggaacgagtcaaaggtgcacttggagccgagcagattcatctagaggaagatggcggcgacgtaccgtccgtcaaggtgtcgggtttgaagggacaaggtctcgacaccttggtagagacgctcggcgtattggccgaggttcgagatttgagggcaaatatcgacggtcgaggggaaggttgggttttggagagccgggtggaaaagggtcgagggtgggttcgaggtagcaaagaagatagcgcgacattcaggctgacagtcttgtggccgtttgttgcctggtatgacgaaataggaacagcgctacgatccttgtgacgcgaggcacgttacacgtcggatcggtcattatcgccgggacgacctggtgcaagatccgtcagatgctagacgacaagaaccagccgatcaaatctgctccgcccggaacgcctgtcaacattaccggctggaaagagctgccgctagccggcgacaagattttgcaacctaccgccaagggcaacaaggccgaggacgaggtcaagcgcgctgtcgccaaccggatccgggacaaggaacgcaaagccctgatgaacgatgtcgaagtgatcaacgagaaacgacgggtcgagcgggaacgtcaaatcgaggaggaagctcggcacgaggcgatcaaggccgagggtggggatgtcaatgccgccatccggagcgaagagcgaaagcaacgtcgggaagaggaagaaaagggcaagaaggaactgaggttgatcatccgggccgatgtgacggggactgtcgaggccgtcgtcggcgcgctcgaagggattggtaacaacgaggtcgggaccaagatcatccacacggacgttggtgacgtttcggattcagacgttgccatggccgaggcatctgatggtgagtcgagtcgagacctcgcacgtgtttggatcaccttttctgaacacgacgacgacgacatgtagctaccatcattggcttctcggtcaaggcgcctcgttcgatcgagacgctcgccgcgtcgaaatccgtgcctctgcacctcgaatccgtcatctatcgtctgatcgagacggtccgtgacaaggtggcctcgctccttccgcctgtcgtcgaaacgcgggtgaacggagaagctacggtcctccaagtctttacgatcgccatcaagggtcaaaaggagggtcagatggtggctgggtgtaggattgccaacggagtgatcgggaagaacgatactgtgcgggtgttgcgcggcgacaagcgagaggtcgtgtttgaaggtacgacgttattgagactgtcttgtttcacaacacacacacacgacactgactcttgacctcaactgcgttcctccgtacaggtccgctcgaatccttgaaacacttgaaaaaggagattaacgaagcgcgtaaaggtagcgagtgcggcatgtcgatcgacgggttcagggacgtgaaagagggcgaccagatcgtgtcgatcaccaaagttgaaaggcctcaacagttgtagaacacttgtaggatgatccacgcagtacatagacaccacacaccatcgacgacacttgttttaccatggcatattgcatacctgataccagataatttccctgatcaaagacgtcgacagcttttttttgcttccgcgcttctcccgaacaacccgacgaagacgagtcaagctcgaactcgcctcggatttcgggtcaacatgcttgtagatatgtcgagacacattacagacctttatcatcgtacccggtgttccctctcaagtcaactccgttcatacgtatacgtccgccgatatggcatccttccgatccgcgttgactctcaagtcggcgaccaagtcggtcgttgctggcaagaacaccatgcccaccgcagcagccatcaggtggggttccagctcgacccccgtccagtcggaacccaaagcgcctaggcccatcgacgacagtaccagtgctcttgactgtacgttcgttctcgcattgatcgctcattacattgaggtggctgaggatgcagctaatccgcatcgaattgtctcgctccacgcttgcagacaaaatgacgaaacgtcgaccacctccccttcccgtctactcgcaccctcgatctcctaccgccgaggaggccgtcaccaacatcctttacaacacccctgctccttctcaagaaccgtacaagaggtgaggcgcgggcttgtgactgtgcgccttgtctggcgttccgattcgagctgagacgacttttccgtggcataggcacactttcaactgtttggtccagaacgaacccggtgtcttgtccagggtttctggtatcttggctgcccgtggtttcaacattggtgagctcagtccacctggcttttcccatcgtgccgtcagctaacaacgtctcgacgacctggcagactcgctcgtcgtatgtcagaccgagatcagggacctgtccaggatgtgtattgtcttgaggggacaagatggagtcatcgagcaggccaggaggcagttggaggatctggtcagtggaatgcggttttcccgatgttcattggactccagctaaccgacatcatccgcgcccttgccgcaggtccccgtctgggccgtcctcgactacaccaagacgagcaccatcgctcgggaactcttgctcgccaagatctctgtccttggtcccgagtacgctgaacagcagatgtccggtggacccacccactcggcgcacgccaccgacgccgtgcacgactacctccctaccaacgagtcgggccacgctcaggaacctaccaagtatcaagctgagcaggctctcgcccagactttcgagtctggtggtttgccccagagcctgagcacttacaacggacgcggccagcaccaatcccacggtcatgccctgtctcagtccgaggccttgatcgccaagaacttgcacttgaacgccatcaagaccttgaccgatcagttcggtggaaggttggtcgacgtcgctgaaaactcggtcattgtcgaattgaccgccaagagttcgagggtcgaggctttcctgtccctgttgcgaccgttcggtattctcgaggccgctaggtccggtgagttgatttcgcggccgagtctcgtcgatcctgctcgtgtaactcacctgttttccggttgtcaccttgcctcgtgcaggttcgatggtcatgccccgaacccctatcccccgtaacaactatgacgacgacgagcctgccgaagtcgccgcgctcgatgcctcgttgcttcctcccggctaaacgccttctggaggcgatcgcgatgtcgcacgggacgtgccactacaacaagcgtgaaaaccaaaaacaaaaacctgggttcctcgtttcaggcctttgtgtagtcttgttcctctctgatacttcgggtcaacgtcatgatgatttcgattccataccatacacaagagacgcgggtcgagcgagcagatctgtaaatgcgtgtcgcgatgttcgcgtgcatcccggaacgaggtttcatcgtctcctccttcgaatccagcgagtccgcgctatacacaacctgcctgtcgtcgatgcgttgcattgaaggccacgacgacaggatcaactcagaagagacggatgaaacaagatcgagctgaatgtccttaatctccagcttgccactttgatggaacccggtctcgaacgtgagcgcacctgacacgttggagatttcacattagcaatcggacgttttgacttcgttgaatcagggctgaatatcctgacaggcaatacagtctcgattttgggtacgtggattccgggggagtggtgagcgggtggggagaatcattgcacaaaagcacggtcgaaattcacagatccgtcatgacaaacgatttgcggggatggtagaaatgctgacggtcttacatgaaccgattccggccgcatccttgatccgtccgatgattacaaacgagatctctgtttgaattacgactggtaatcatcccgcccgcctcgatgtcgcaagtctgacttccgaccctttttctgatttttttctgaaactcgtatcaacgcgaacatcagaaatgacgaatcggtccgggttgagaaacagagacagatcagttccaagtcgttctcatctttgcatgtttctacctacatcgacacggctcgtagcatcatccgaatccactgctcgtcatcatgagcgatccagctagccatgcgaggcagctcatgcaagaaaaagacaacatcgaggccgaaatcgtcagtcacgccgactcggtttcccggcgagcaagatgctgatcaagcgtctactgtcgtgacaggatgcctaccggtcacagctccaacaagtcagcccatcaccttgatcgccttttctcacatcgctgacgatgttgtttggtattggcagcaaggcgtgacgatgacgactccgctcgttgaccccgaaggtttcccccgagccgacattgacgtctatgccgttcgtcacgcccgggtctctctcaatcggcttcgaaacgaccatcgggacgtcgttgatcgtctaggtcgggtgttggaacaagtctatgctgtcggagccgtcgtcgagcctaggtcaaccgagggggaggaaaagatggtcaacggggacggacctggagcagggccgacgtcgacgcctatcaggccgatcgctagggtcaaccttgtctctgagaacagtcccgctgctaccgccgtacgctcagctcgtccagaccgtcattctattaccgaccttcactaacgtgcttgtaacgctcgcaggggctcgaacgtggcgacctgatcgtctcattcggcgagctctcctcagtgcagggccacgctatggcagacatcggtcaactcgtccaacgatccgaaggagcaagtcccgatcatcaccccggccgagcacattcacattcgaaactgacgacgacgggcgatctttttaggtggagattcccatcacattacggcgcggggaggagacggtcgacgtcaagctgacaccacggacaggatggggtggtcgagggttgctcgggtgggtcctcgcctggggtgcatcgaattttcccgcatgggttggtcgctcattgtctagggctctgttcagtatgcatatcgtgcctgcatgagcggacgattgggtcgatgctgcactggcttttacacgacaactcctgctcgtcgacaccttgaacagcctgcaatcatcatgcgagggtgagatcatccacctcttgcacaataggcctctcaagcggtgccacagtaaccaaacacttcaacagcatgcggcaatcactcgtaccgttgagaacaaaatggtcacgaggtaggagtcgagtattcgtcgactacccagcaatgctgcacgtagcccatcacgaacccatcacgttgtttcgtgttcatcttcatctactttgtatataaggatacatgtcattttccaacctattttttccgccgacttttgcctgggtcgaccgacctgtgggtgtttgacctttactgggtgatcttgctctgaatcttcttgtcggcttcttcctccttggcttcctccttggcccgcttctcactttcctccttttccctggcctcttgttctatcatcgtatcagacaccgcgatccgcatgatcagccccctggcctcacttcaccccgcgtcgagacgccgtccgagagactcaccgaggatatccctccaactgtgatcttcggcctttttaggtttttctccttgagatcccatcccggcgagcatacccgaggcgatcaatgtgccgagggtggaagcctgggcgactacacgggtttggacgagctacgggtcgggacgagcgtgggaggagagggagggggatgtggagttgatactagggtcagcgagggtgatgccgggacgacgtttggaggcgtgcgtactttttgggaaaacgacatgtaggggcttcgaccgatgaagaaccctgcgatggccattgttcccaaccaactatcgtatcgccatcgagagaggtaatagagtgaaccgacaaccatcagccatccgtcacctgaacacgacacgacacgccacgacgtgccacgccacactgcacgacctcgaactgatcgactgaccttccaccgacgatgctccactgatacctctttccccaatccttgactttctcccccgtagatagtccttcccacctcttttcctccctgtcggctttatccgcttcgatctggttgacgcccaagatccccctctcgtacctctctcccgccttttccgctccgatcgagatgcaggggacggcgaccgtgacgacgccgaaagccttcaggggcagggggatggctcggaagttggcggactgtctctggaggaagaagaacgctggggcgaggatccctgcggcgacggcggcacccttggcacctccttcgaggttgtgtcggaaagccctgacgtggttgggatgggtgtgtgggggtatacgtcagcaggtgacgaacggggcgatcggttcgaggtggtcgtaggactgggtagacttactcgttggcatgttcttcagtccaggctcgtccctatcaggtagatgagttcatcaaggtcagctcggtggttcgaggtcgaatcgatgatcgagacttgccgacatgattcgattgattttctagtggtggtggcggatgacgtttgcagagagaggtttgctcgtggtgagacgaggcaagattcgtgtcgagagtttgatttgacaacaacggcggtgtgaggcaagcaggtgtgttcaaggagatcactttgtgtgtagcagagggatgtagatgagtatagatggatgtagatagatgggtgtgattatataaaagataaccctgcctgcggtcgatgacgtctcgacttttccgcgtaaactcgcgattttggccgaaaaagcggagaagcaaggcagggaaacacggttctaactacaggactctctctctctctctatatcatcctcttcttccctgaatcaccgttctatcaccacctattcgatcagtcaagtagcaagcagtcacaagtacaacacgcccccgcaatgactgccatcgttgccggaccgttactaggtggactcgtcggatcggcggtgagtcacgaccgggcaacacgtcacgccgacctggagagcacggggatactgatcgacaatgatcattccgaatcctcggggatggacggggtatacaggtctactataccatctcacagacgatcactaaccgaacatctttgatccgttccgagtgagccgatccgtcctcgagtcaatcacgccatccggtcgtgacctgacccactcctcctccttcgtgctttcagacttcacgactgctccgtcgccctctcggcgcactcatcctcctcctcctcattcactcaagaccccaccccgacatcttcccaactctcccatccatacccacactatcgcccattgtctgaccaactccgcacccgctggaacgctatcctcgagcgcacggtcaccggggtggagaccaccgactggaccaacgtcctcggaggggcatacgatgccgccgctgggatcatccaccgtgtcacctcttcctcgtcgtcgtcgtcttcttcgtcgatcatgggtggaaaacccggcaacctgaaagcccaggaagattactacgaaaactctggcttctcccccgtcccccgggagaccctcgcggacgcgttcaagcataaactatccgacgtgcaacactctgcttcatccgcgatcgacagtgccttgcatcgacgcaacaccacctcgtcgtcagcgtcgaccccgagcgaatccgtacgcaaagacgtctcgttcatcaagcaagaagagctcgccctggcggatacaatccgggatggcaagatccccgggagtttgaacgatccgattgggaaacgggtggaaaaggcgctcggggtggacgatgtcgggcgagggaggttggtctagttccgagtcgggggctgggtcgggggcgtctctttgcgaggtcattggcgggagggatattacgggaagatgtgtacgctgggtatagatgatgggaaccggctctagagattttgagcgatatacgatcgaaatgaatacctcggttcggcgtcgtcaggatccatcatcaaaatcgtcaacagcatcacaacatttctgtcagcttctaggctcatgacaatatgtggagatcgggacaggctctcattacttgggcctacgatagtagggtttcagctgaggtgttcttccctctgtgtacggggccgaagggcgcaaggtggttccgccatctttagctcgtactccccattctcttcttggtcttcttgtatggctagcttcgagagggggagtgttgttcttgggtcaacttggcgtgattacaaccacgaggacaaccgcaaggacacccacttgaatccccgcataaaacgtagcggactgtcgatctcgacgtcaaggcttgatcagacgattttcgtgtctcttcggtcagcgggtttcacctctccgtagcagaaaacggtgctcaggttcaacccaaagatagagcaagtcggacgctgtgagcggcaagacgacatatcgttgacgccagaattcggaccacatgctcctgtcgagactacagcgcatcgttctagtcagtcacaagcgagaggcgccgagtaagtatcatgttgagacccgcctgaggcccgcacacgcattactttaacaaccatgacatgattgagtcgaattcggagaaggtcaattatctgctttgcagcccactgaaccattcaaaacctatgtcacctatgcagatatgcgcatagccaggagtcgccaatttcccttgaccacgagaaccgactatatcaatgacgatgatcaaaaaatactaactattccattgagttcgagcatacgaatacagacagccttctatacaactatattattatctaaagaacgtccatcgatacccaagagaaacacaataaggagaactatcatagagagaaggtaattttttgggaccctgacccgagaactagattatactcgatccttctaacagtctaaccatcaccgcaggtcaaacgccgacaattcagtgccggcgcgcaagtaggcaacgtgtgatgtggatttaccagacgctacgtttcttgatgacttcctttcggacacaagtctttccatcgctggagagcttgtgagatcggtcgcatcgtttgactgcgagttcgggtgcaggaccgtatcagtccaccggtcaagtaaaggtagataggacatcatgactcactctgacaagtaccctggacacactgaacgtcagcgactcccttgagttcactgcagtcctgggtcccaggggcaccggggcaaccaccacaagctacacatcgaaaaatgaatcagcttacttgtcgctggaacccccaaatcttgctgctaaccgtaaagctcgctcgaagtgtcgatgcatcggttgaaccacctcttcctgtctcgcataggacaagcggtatgtccagcctcgcagatcatgtcggcgttgagaacggcctcgccggtttcgaccgctcgtcgttgtcgtcgggacagctcagagacggtggcgggcgccgaggtggtagttgcaggagaggtggcggtagcagtcgcggaagtactgctggccatcgaggtgctagtatccagagcgtaaaccgtaaaaatatcctcccggagagagaaagtcggtcgaataccgatctggaaaccaatcatactactagcatcagtacccgaaggaaggtgagtgtttcaatatttcagacaagcttaccctcagttgagtcgaaaagtcttgaccttctactccggcttgtgtcgccatatccccactgcgattgaagaatgactcagcatcctcgaaactacaacctcgggtatagatgaactaaccgagtcctagaacagactgatgtaaagcgaccttctgaggtgaactgggagctgttgatcagaaggagtcagtttcatcgatgccttgcgattcgacaagccgactgacaaagtgcagctgacgaagcttccgtcggtcccgtaattggtcaatcgagcagacaagacgggaacattctgacacactgaaatacacaaattaggatcactatttctgagacatcgcaatggattggaaatgaggcttacgtgagtagtcgtatgtgtatagctgagtgaaacctgagttatcgttggggtcgaactcgtaagcccagttgaagttgggtgtttcaatggagctttgacaggccgagatcattcgttgctcaagttgagcctgagtagcattgccagcagtctgagccaacgaggtcggcaaaacagccgcaatggcggagacggcgagaaaggtcttggtgaaggtgaacatggcgtccggcgagtgtagtctagtcaaaaggtactggtatgtgtgaaggagagtattgagtgatgatgaatatcctatgtcttcgatcctggtgtccggatatcaacaatgacggtttatataaaccgaccctctgagctttcttcgaaattcgacgacctgcatcgacccgtttcttgttcttgttcgcgccgatccgatcatccggtaaatcaggggtggcttatcacgtacctagtttctgcgtgacctggatgttgtaagctaagtctcgacccttgttgagaacaatgtcgttgcgtctcgaacaatgcagacgtcgacatgtgcggtgagacttttcctgacgctcgcctcgacatgatagtatggagtggacggcccacaaggcaggtatattccgagcacatggccgaacgtggtcaattctcctcagacgcgagccttttgtcgtcgaccacaaagagagaatcgattccttggcagagcatgcggtactgacgtattgaacgcgatttcttttcttcctcctcgaggtgtaagcaggaatatggcccccggtgaatctgaaactaggtttgccccgacgcgatgccatgattcgaccatcggacaagcgagaaatccgggctccgttgggtggatccgatcaatgatgaaattgaccgaagaccgaagccacgatcgacaggacgaagtacccgcacgcgcgtgggaatcgttagtttccttttgttcctatcttgttcatcacctattgtcgtccctttttgatctcgatcgttcaatgacggcgggatgaggagacgaatagagattactatcggtgggccaccctctcgcttcgactggaaacgaggtgtcttgtctcgctcggtccaacagttaaccgtcaccctcacatctaaatcattttcattcttcggttagaatcttccctgatcgctccttgacccaccaggtgtccggggttcaatcagtagacatagcgtgaaatgaatccgcgagagacaatgagcagaagaggaccagctgtatagctgccagtagtagcggtacgtcgcccatgacgacaggcagacgcgcatgcaagcccttgttatccagttctggagggctcgcgtctgcggcgcaactggtacgagtcagcaaacggttggcatcgaaccgaaacgacagcccagtttcctcgtctgccgctctatgacttgcgttcgtacgcggagagggatcacggcatattcctgatgacattcttccgcgcctttcccgacgggattgccgccatgagctccagacccgctccatgtgatcaagcgtgcaagtcttgactcttttgtctcgacttctcgaaccaggaaggcaaaccgaggtctgaacaaaggcaactttagtcgctcctcaacatgaactcatgatcgcggccgcaattgagaccgacgtttcaagtcgagtcggccttgtttctaagcgagaacccacccaaccatatcgaaagccatttgtatatcgaccgaatcaatggatacctctgcttcaacacaaaacagggccttgaacaaggggtagctgatcgttcatgattcttctttgtttggagttacaatctcgtccttttcttctcgaaacttgacacgcagtccgtctactttcggcgaagaaagatgactctactctgataatcacccttgagcgccaggtgcagaccgaggttcatcaacgtctgtcccttgtactcgaccgtgttctgaccttcctcctcaagctcatacgtgccctccgggtccagcccctgcagcctgacgggtgggctatgccaattgatgatgctctgcatacgataagcgagcaagaccgcctcggccttgtcctttgccacgaacatggccgtcggccaattagattcgtctggtcggttgatccggtagaggtctccgtggatgacgagcgggttgaccttttcactgagagcgacgagtttcgggatctggtcttgttcctccttgggcaacttgttgaggtccagctcgaacccgaacgatccgcccatcaaggcgacgtgcgctcgaaagacgagtggggtcgtcctcccagtttgatggttgggtacggccgaaacgtgtgctcccatggacgagggcgggtagaccaagctggtcccgaattggatgaacagcctgtcgatggcatcggtattgtccgacgtccatgactgagcccaataatggtagagccccgggtcgaacctacctccacccgaggcgcacccttcccagaggacctctgggaacctcgtcgtcaaggtctccaagacgcggtacaatcccaacatgtacgcgtggggttccgccggggaaggcaattcgtgcatccctcggttattatcccatttcacgtacgagatgtcggcgctgttcaggatatcggtcaacttgtcgataatatagtcctgtacttcgggcatggccaggttaaggacaagctggtttctggcctcggtcaacgggtacccttccgcctgaagggcccattcgggatgttgctcgaagagctccgattcggggttgaccatctcgggttcgacccagatcccaaacttcatcttttctgcctttgccccgtcggccttggttaccccgaacccggtgatcttgctaacaaattcgtccaacccattggggaacctcttggggttgacgacccagtcgcctagaccggcattatcgctcaacctcgggtgtttgacgccgaaccatccgtcgtccatgacaaacagcccgacaccgagctcgctcccacgtttcgcgatgacggcgaggttctcctcgttcatgtcgaagtacgtggcttcccaattgttgatcaacgccggtctcgccctatcgacccacttgcttttgcacaggtgcttcctgtagagggtgtggaatttcctgctcatcaccccgagtccctctgaagagtagaccgccacgcattccggtgtagtgaaagacgcccctggggggagaggccaggaaaggtgttccgggttcatacctgccaagacccgggtcagaccgacagaacctttttctacttggaacgagtgggatccgctgtagacgagggagaacccgtaggcttcccctgcggtctctgtcgtgttcggggcggtgaggcacaagaatgggttgtgcagatgagacgagtacccggtcaagctctggaaactatggtcatcgagcaacgtatcagccagctgatctgagaacgcatgtgggagcgagcttgggctcacccttgggtaccgagcacgacgggtctcttgatgatcctcgcttccctcgcccagtccccgctcaactgcatcatctcccactcgccactgggcatgtcaacgctgagactcgctgcttgttcgatcacgatctcatcttgactctcgttgacgatccgcatgcttcggacgatggcgtcgtactcgacaaagatggagtacgaggtaaagaccgtgaccttgacctgtgggtcgtgcatcttgacgatcaaggtcgagacgtccttttcctcgccaaacgtcgccggtagaccctcgagggagggtttgcccttgaagacttcgtgactttcgtactcgagcctgaggatggtgttcccattcttcttcctgatcttgatcgccggtaacctaaagtctcctctcccagaatcgggcaactccctagccacccttgtcaagtaagagccccatccaccgtcgggtcctccgacatcgggtgtagtctgggtggtagcgggtccgaaatggtcgtgtacgagttcgcccgactcgtccgcatgaaagatgtatgaggcgcccggggaggtgagcgagaacgccttgctgtcggccttgacggggtctgttcggagggtacaggcgtctgaggtcacccgatgggcatgaagaacacgttcgttcgactcacgttcgtttgacattgtgctcgattgctgatgtcggtgcgactctcgatgttcctgcttagctagaacgaagtggttgctgccaataaccaaggacctcttgtacttgaatcacttatcggcgatggatcaacgcctcggagaaacttcgggaaccggagatttcggggatcaacatgcgtggggatgggtggatcgggtggatcagggaggggtccattacgtgatttcgagtcgcgagacaactgactggtacgagccacaaagccgcaagatggatgattcgaatcggtacaagtgtcgcattcggagaaaacaatcgctttacaagacacacacacgggtgtcatctatcgcccaattactcgctactcgtcatcctcgtccgaacccatatcgacatcgctaccctcgtcctcatcctcgtcatcgtccgaaccatcttgtcggtccatacgttcttcacgttgggcctacacagaagaaaaccagcgctcgttcagctccggcgatcacttcctgcagaaccgacgctcgactctgaaactcaccgcctcgatttcctgcctcctctgatccctgaccttgcgctgcaacctcatccaacttccgatcggcgtgtcttcgacattggcgtcctccaagaacgcggccacctcgtccctctcgttgggcgcaaagttgactccccttcgtttcttttccacccacgtacgggtcaattcgatcttttccacgaccgtcttgatctgcgtcttggctttaccggacccgcctccctttttcaagaacctcttcaggtgggcaatgaccgggatggtcatctcagggaacgacacattcctgctcatcagcgcaaagaaatcgcccatgatgaacgtcaactcgtcggccaaagtttcctggtagaccctcgacttgaggtacgagttgggtgctcggatcacgtattccaggtcgaggggacggagcgagctgggtttggggttgctcttcttgaactcggccgagtcgaggatttcgagcaggaagggtgcgagcggtacataagtaccggttcgtccgatgatacgcagcatcgagtgcatgacgtggaatcgcagggggaagaatcgcgaggtcggtacgagactatcatggttgatgtcgatctgttagcggggcaggtccaggatcattcgtacaggtttcacttaccgaatgacacccaacgcgatctgcaccaaggggaagatcaggggctctaggggactcgccaaaccgccgctctcgatgaccttttccttgtcacaagctccgctcaagaccgtgctccaaaagtcgatacagtgcacgaactgccagttgtacaccgctcggaacgcttcctgatccgcctgacccgatcgaaccacctgacgcaagtggatagccagcgctcggatgtatccgaaagcgtgctggtacgagatggcagggttgatttggtagagctcagcggccgagttcttcatcaagttgagcgaaggcaaggtgtgcgccgaggtgagacggagagggggcaacagcgcggagtagatgttctgtcgaggcggagacggactgcatcagccaaacggtcttgagaagtgccactagggcaactgaccttgagacacaactccttgatcgtctcgtcgcccgcaacgtagaccttgcggacagcaaggaaacacgcaatcctgacgttgtcggcagccgacgaccagagatccaacagcagctgcaaggaatggcatgatcagcttgcaagatcagaatatcgggcgaccaccgaagcttaccttcaagtacgccctgacctgcctcttgccttccatgacccaaggcaacatcttggtgctctcggtaacgaccgtgtacaacaagctgtccgcagcaccctcgacatcctcatttccggtgggagccgatggcagcgacttgatgaggtacatgatggtggtaaagtgggagagggcgaatcgagggagggtgggatgagctttgggtggcggctgcgttttgctgcagcagagcatagacgtcagtcgtcagtttgatttcgtcacgggtaggacttcgcgtctcgactaactatttccctgagggcagctccttcgatggcatatgcttgttcagcacgacaggggtgaatttcaaggcggtcaagatcaacttgttgaacactgcccggtcgaatatcatcgatcagcttggtaacgggcggatcatctcgtcgtactgctcagaccaaccttgcgcgctgtcgatcttgtacttggtctcgatctcatcctcgtcgtcttggttcatgtgagcggccgctcggaaagccaagatcgtctttctcagcgaccgcagggaactttgctattgtgtcgcgtcagccgcaagttcagattatcagctttggcaacgagtgtacgagtcgatggggacgactaacctcgatcatcgcccgctgccacgatcttagcatcttcattgatactgaaaccttctcgacctctttttgctcctcgggctcgccaaattcgggctcatcttccgaaccacttccggcatcatattccatcatctcgtcttcgtcgacgacttcctgcttgcctttgcccttggctgccttttccttcttgctggcctttgacttcttgggcagctcgacttcctcatcatcctctccaccctcaaagtccaacaattcggcatcgttctctttcaggtacttgaaaaattcgggatccttcttggcgaggtcggcgagcgatttggccatggcggcttcatccgctgcgagcgcagcctcgttgtcatcggcgtcgtcctcttcctcgagatcagaaaactcttcgagatcctcgtcgtctgattcgccagcgtcgtcctcctgcagaccgaacctttgattagatacaggtcgcaccgggccaaatcctacgtcggtacttaccccggccaaagctttcagtccctcgacggccttgcccttgcccttcttgccgccatcctcggagtcgtcatcagcaggcagcgtgatatcctcctcatcatcgcttccttctacttcgctatcatcgtcggcgtgctttccttttcctttacgctccttcctcaacttggtcgcctcgcgtcctgccgtcttttgcttgatggcctggtactttcttcgcttggtaatctcctgtttgagcttgcccgaagacacaaactttttcgtctgcttggttgctttagccatttttgtgtacttgatgtctattcaagtcggtgacgttgcactgtgtaggcgttgcaagcagcttgtacagacttgaacattttcgtacatcgaaatggccaacacggtgagcgagctaaggtcaacttttggatcgacctaatatgtcacgtgatttcacaaaagcttccgcaagtgacgcctccggaagtataaccccgtccgttagactgttcatgttgaccccgagcttgcaaccggttgaatgatatctcgcctcatcacgagaggaatagatcgaggttccgtttggtatctgaatgcataatggatagctggaacgaaacccttggtcgcaggtcgtcataagccttgacaattgctcgatcgaacaatggaggctccttgtcgagcatgcagccgcacctcgtgacagcccgactatataagatccctagctgcagaggaggtttcttcgctggatctctggcctgatggtcttcgaagtcgaactaataatactttgactttcgtgagcaatgtcgtcagatcacaccgagagtatatttcgggacgtcttcatggctaagaagaccctgacagagaatgcagaaatcatggagatcgtggtgggacgaaaagcatcgggcttcaagtcgagtctactgatctcatctgctgtcacgcgagcagaaaacgaggtgtttcgacaatttgatgatccgacctgctgagtggcgatggatgccacattcattgatttgggctataaaagaatctttttgccactctcattggactacatcgttgtgcttcgatcgcagtgattggcatggaagcccatctcatagtgtgatcaacgagagggtcagtttgaccgatgccaccaagagcgcgttcagcttgtcggtccggccgaagccctcagaaaccagcacatcagacgcctggaccagcaagacactagaattatgagccgtctctgctcttgtagaagccatacaggtagacgcctaggacaccttctgtcatagtatatggggtcgagaaaaggaatgcggtgcatacgcacaagaggagagactgtatgcgaggcgtctgctcaatcggtatatcatttcatgtgtcgcagaattgctccgatattttggggaatgcattgagttcgtttcattggcagccaaaccatgttgtaagtctcgaaggtacaagaacggagatgcaatcttcacgggacactgctcgaaagttactagcactatccacactcaacatgaacccgccgtcatgccccgaatcgatgcacgatttcagtgtctagggatcaagcgtaagtcaacaaagacttgattccgttccaagctttcctcagcggaaccgacgatcccctatttcatgggtttcggaagggggactgactcgggcgtgatactgccatccagaggggaagcgaccacagtccattgacggctccagccgccggactcgtagccatcgatccagttttgacagagaaaagtgctatgttccggccggccatgcggttataatatgtccgtgtttcagtatatagttgaaagcccacgaattagcagcggaacgatacaagagtttacgccttgagagacaaaccgggttgagactggacttacacctcgcatccgacgcattcatcgatcactttggtatattgggttaggtgtgcaggagataacgatagcatcagcgtcgccaattaggttaacacgggttccatgtggtcggagatttgggacctacattgaaagtgtagtccgtgcgatcttcattccaccgaccgactctgtttgaacacagccgtaatcgtcaggatatcgagtagcaaaacggtatagacttgacaccaaatgtatatcatctccaaagggggataggagatgaactggaccggagccgaggttatgactcaccggtaactgacagtcccgtttatcaacgaatgatgactcttgaacgtatattcttgtccctgtacgatctcgtcagagcgatggacactctgtaagaaaatacgagttcccttaacttaagtcaggagggagaatccggtggatgggagcgaattgattgactcgagcttgagagaagaatgggtgcgggaaaatcgaagcttggatcaagggggcaaggccgaggaggacgagcgttgtgagggttaagagacggaattcaaccatgtcgatgggttagtcctatgtttaaaagtgagtttagggctcctgggatgcttcgcaaagctatcgaaacagttcctcccaataatttcaattgacattcgacttgacgtgatgatgtacgatgtgcgatgcatgatgcccgatagcaaaaggtgcacagccgaggggctccacacggtgcgccacgagaagcgactgcggaaatattatcgttcatccgcggtacgactttactgtcacccaaaccttatcgatcggttcaagtcaagcacgtaaaccatcgttggaaggggagtgggcatggtatctacctctaagaattttcagaagtggcactgacacacgcatcgcgccgactggaggacaaatggtcaagggttcagaggttgtcgttggatccgatcgtcctcccggtatgatcaagaaggatgcgcattgtcaggtgagcgacagagcatgccgcgattctggctcacgatggcgaaagtctttatgaaaggaagccgtacgtcatgtgacagtctactattcgagaaaggtgtaatgtgtacatacatatacacatacatatactgatcgcaacagtcgacctcctggagtatgaattataccggaagccgtaacatatctgacagagatcttcgccccatgagcgctgcgaccgatgatagcctcgaaagaaagtgggtcgtactgagcagccttgacgttaatcatgcggttgatctggaggtgagcagcaatatatctcgcactgggtagggatagttcaagttcaatcttggttacagagcctgttgggtcatctcgtacagaacaatgaacacgggcaagactccctgctaccctatgttcactcaaagggacccgcagacaatgagcgccagaaagaggagaagcaagatatactaaggtctatgcagcatgaatggtcagcttgtcatgatatatatcgaccggtaagaaatgccttggtaccggaatgtcattcacctgcttattgtgcatcatcactgcctgcttcaaaggaatctttccttcaagttacgaagtatagagcgaggcaggaagacgcagatcttcttggcgacaaggacacgtacagtgaggatcaaggtcaaagatacaaaagcatacggagaaacgccttcaagcggccagtttatcgcttcactttccaatccaaactatttcctctcatacaagtcaaagtgagggcagggagacgagaacactataggcttgatgacaaaatggccaaatgtcgaccctatatcgtggacttttactacctcagacctatacctccgacccctgccgtaaacctgccggcgtcccactcctcttttggcgttccgtaagttgaaggaacgataatcaggttttcgtggccgtgactgacttaacagagcgaaagcatattttagaccgcagtcattatcggtgactgacccaactgaaagcaacttcagtggtactgtacaaaccgatcgcccggaggcagcttcgttttactcgtctggatccggcgcttcgtctcagtcttacgtggggagttcttccgggccgcggaatttgggatctattcccccggacagcggacgcctggtcgtagcttcgtgtatctggggccctcaaatttgatcctgtagtgaaacctgaattgcagcggaagaaatcccaacccgttcatgaccgaaatacattctatctttctctcgtttatggtaaagtagcggaaacacgcaatggcttgttgaccgccatcgacagaggacctgtagctacatacgatctatgacctctactgtagagcgagggtagaaacgtagcttgcacattagacaaaggatcgcaacgcgttgagtgcgtactttgacttttccatttcaatcgcccctgagcgcctctcacagcagtatgacgtcgcggttgggcttgatttcagtatgcatgtaatttgtttttgttggggtaaacactggtggagagagatgcgagaacgatacgccgttcaggggatgacgttatagcagacatgttcgatgacgtggctgctgagctcatccaaggtcgacaaaagaatttgaaacaccttcatcgcgccttggcagggatattgacctatacaaggcctttctcagacccctctcccttcatcctgcctaactctaggatgtaattgagaacatcggtcatttccacaatggcaaacctcgatcagctcaggcacaagattttttgggtagtgcttagcggttttgaagtgagttaggaaagcatatcagatccgctctgctcaactgatctttcgttgtacttataggacttcctgatatatcaacacaaagttcactgatgtctcgtggtgcttataggacttcctgatggaataacacaaagttcacggctgggataccgatcggctggataccatctttgaagctgaggtaggctcaatcttatacagaaacagcgacgaccagatcaggtggcagaaggatgggattttaaccgctatcgacggctcctggcggaacaaacccagataagtacagtaccagtttcaccgcggaagtatgcttggaataacccggatcttagcaggtgatcacgtatgcctcccctttctgctacagagtcgtagaaaaggctccagaagaaacagtagaagagggcgactcgagcgaacacacccttcttggacactgcagaagcccctcttcaagtagcgttagactcagcgatttgcctatcctgaaattgcggtctgagcttgaacccagagtacatggttgcttgtaccttctgcttaggaggacgcattggtattgtactcgcgggaggacggaacagtatacctgtcgatcgcgcagtgtctacgtttcggattttcattatcctgaagatcgccaaccgaacgacatatcgagcgacctcgtatcagtgacaacggcttcttccgatacagaagcgacaaagccttctgtcacactgccgcggatccagaatttgtgagtatggcatttttggaggatggatcattgtgacttgatttgacggacgcttggggtgtacagttcgactcgctgatccttcgaatccccaccgggaagtcataaatcaggcaactctgtcgtggacatcgactacaatgactcacactacgagttcaagctctgcaaactcagggacgatgtaaggtatactcaaatagattgctttgtctcgactcacgaagagcatcgaccccttcgcgctcgagcagccgtcatggttggccgagttttcggtcgtcaatgtcagtttatatcgaaatccatctaatgtacaacctcgaaccaaggcagcttatgaatacaatatgtccctccttatctgcttaagctcccacgatcctgcccctcttcccccaacgtcgcatcctgtgctgcaccttgctaaacagtctgaccgaagaagtctggtcgaccttcgagaggatgttgtcccgagcgctaccaagcgaggaagcctgtatctaatcagcccttgctttctcaagtgtcgtcgaacctgcagagatgaggctatagactcaccctggccatgacggcgcgtttccactttgtcttctcttcctgcccaacgatgtacctatcggcgatcgcgtacgagatcgaaccgaccccgataacccagaaaatccgggggaggatgccggtgggcctggcgtacttgtacatcttgtttccgggttcgtaaaagttcatcttgtggaagaggtttcggggatattggttgtgtgaatgtggttgtgtgttttgcgaatgaaattggcttggtgttcgacggtatgtgcccttatgttgagcgactcaccatagttgaaattctcatgtaccttatatccctttctgagctgtgatcgccaggaatcgcactaccacccagttggacgtcgacgaccacagctcgacttcggccgtttcagctcaaacccagaagctcgaactcgagcgaagttcggaacaaacaggcgcggaacaagacgcgcgcgcgcgagagagatcgcgctgatgcgaccgagcccgggcaccgtctcgtgtcgcttcgaagcgagaagagtgagggacgtacgacaggtctgggtcccacgaaagtcgccgattccaggtctcgctagatccatcgaggattccgtgcaaggcagaacccgaggtcttccatgagtgacactcgtgacttggagtcgtccgagctgcgcggtgaagacgaaaagcgaggtttgggcaagacccgatttcaacggaagctcgcgcgatccttgcacgagcgattaccggtacaatcgcgatggttcccgaccagcagtattgttgacttgtgccattctcgcaacttggaatcacggagtaatgagaccggctggtggttgtaatgcctgcgcaacggcctgccagtcgggaagagcaacaactgcggaacgagtcggctcgttaaaaaaggccagagtgcccttcaacggcttccgccgagaacctattacgaccgttgacacttcctgtagcctgaggtgaagttgtaattcatctcacgattgtcgaaccccacgatacagaataatgtaagaccagttgaatctttcacgatttgaccatccgcggttcacatgaatatatcctactaggcggtcattgccgaaatcccaccgtttctgccgaacttgccgaacgtttcaacgaacaattcaccgaacaccaccgaaccccatccggttcatataggacaaggtcgaccacttcgacgtcagccacctcgatgcttcaacaacacctcgccgtacaatctcctccccactcgatcagaaccagtcctcatcaaagctttcaacatgccttcccccaccgaacccctcgccactcacatcttcacggccgacccgtctgcccactcgttcgagggcaagatctacgtctacccttcgcacgaccgcgagacggacattgaggacaatgacaacggtgatcaatacgacatggtcgactatcacgtcttttccatggactcgatcgacgggcccgtcacggaccacggcgtctcccttcgaggctccgatgttccctgggtgtccaagcaagtctgggcccccgacgccgcgtgcaaggacggaaaatactttttctactttcccgctcgggacaaggaaggcatcttccgtatcggggtagccgagagtgatcgtcctgaaggtccgttcaagcctgacgactcgtacatcccggggagttactcgatcgatcctgcgagttacgtggacgaggacaccaacgacgcgtacctgtactttggcgggatctgggggggtcaacttcagtgttggcagaaaaagggtcaattcgacgcttccctgagtggacctcacgagccttcgggtcagggtgtcgtcgcgctcatgccccgtgtggccaagctgagcgacgacatgcacacctttgtggaagaacctcgggatctcgtcatcctcgcgcccgagacgggtgaacctttactggccgatgaccacgagcgacgattcttcgaggccgcttggatgcacaagtaccagggcaagtactatttcagctactcgacgggtgatacccatttcctcgtctacgcgaccggggattcgccctacggtccgttcacttatcagggccggatcctcgagcccgtcgaggggtggacgacgcatcactcgatcgtccagcacaagggcaagtggtacttgttctaccacgacacgagcttgtcccacaagaaccacttgcgatgtgtcaaggcgagggagatcttttacgacaaggagggcaggatcacgttgacccaggagtagccgcgtcgtcgagggaactctctcgttgggggattcgatgcggatatatgatgaaatttgtaatgataccaaaaagatgaagaaccaaaatagtctatcgagaaaaaagaggaacgacccggtcggccgaacgagcgacagggtcttccggtgtgtatgcccgcggaatgatggaaggagggaagcagagggagcctgtcgatcaagagcaaacgattcgagcgagaatcgacgaggtctgcgctcccgctcatcgatcgccctttctatcaacgtcgtcgtccttacttggccaaagtggcgtgatcgggaacaggcgtgcccttgatactaatcgatgcggcaaggcgaacacagccaacgagtcagctctcctcacccttgaacacttctcgcccgctcagactcacgcagccttgacgtaatcggcaaacgagaccatgcagaccgtctgccagatgcccaacccgatcctcggggtgacacccctgtacaaccccttgatcccgttctccttgtaaatgtaggacaaggtgttggcgatcgtctttttctgagcggctcggacggcgtcggtcgatttcatcgcggattgcatctcgacccggacgactgatgatgggcagggcagggagagcacggcgggttgttagcttttactctccatgacacgtttgcgaggcatgtcgacgggactcaccctcgatgggctggttccaggtggccagagcacctccgatactggccgctgcgatcttgtccatggcgcctagagactcgtgttccctcttccccctgatgttcctgatcgagctctcggccaatcgggcgaatcccattctgccgcaggcgatgcatacgcagggaaaatcagctctgggtcgagcggtctcgctcacgcccggtgagaagacgcggggggggggactcaccgactaccccagttggtcatctgcctgacggcgacggcgttgacacccttgttgatccccttgattccttctcgcctgtaaatgtccatgaacactgcaaacgttccgggaggagcgacccctgcggcggcttgcttgtgacgggtgatctcgaccgtcttcatgcaagtgcagaaacctacccgatgcgacggtcgcgcgcggagagagcgagagaaaagggagccgagtcagcccggttccaaacaaaacccgcttgtcgaaccgcctatcgttgacacgacgccgacggcacgtacccatggtcgcgtacgcctgagccacaccccctcccatcccacctaacaaacctgccatggcgttccccagacccaacttttctttggccaccaactcgatctctccgctggcaaagagcaagactgcgcccttggtgctcgcctctagccaagcccaggggatgagaccttggtagaaccccttgacgcctccacgggagaggacggtgttgaacgcttggagcatggtttgttgcctgttggctgccatctgggttttgaggacttcgaggggttgaccgagggtggtcacttcctgtagagtcggggtggggggcagcagggtcagtgaggtcgagttcgaggttggctgtgagaggatagcaggttcgagtacttacaaactgtacccgtcgacagtcgagttgcaatcaaacgggagagcagtcagcgacaatcttctcgctccgagctggtaatccggtgtactgaccatgttcatcgtagcacctaaaatccgaaccgagacgaccatgacgcgacgaaggaacgctcatcaacaaacctcgtcccgtgccgtcccatcctctgatcaagctcttgtctggccggacgactcaccgacggcgatgttactccaactgaatcctttttccatgggcgccatcttgaagtcgtctgttcagtttcctttttttaccttgagggagaggtatgcacacgacgagttgatgcggtcgcttccgtgtgttttcgtggtagtcgacgagaggtggaactcgacgtggaatgtggttcaacagctggtttttcgcgcggaatgagatgatggttgttgggtctcggacacgcagagtgtacttacctggtttgactgcctggttgattatacacacgtacacagactactttgaccacagtgagtgagtgagtgagtgagtgatatgaattgaatgtgacgctataggtcggtcgatgtgctgcagctgctaggttgtgtggggggaggttgcgtgcgaggttgcgagttggggaaacctcgaccaagacaacgccaagcgagaggcaggaggcaggaggaggaggaggagggctggacgcgcgcgtgcggatgcaaattacaaccgaaggatcgggtccgaaattagatgcactctcatagagacagccaagccatgtcaccgaggagatagatgtttacagcgagcgatacaccccatcgatcatcctgctcgtgttcgccagctaacgacgtcgattcccggacaagaacgacatcgacacaccgacgatgaccctgctaatcccgctcgctcagacccacgcggtccctcgtcgcgatcagaggcactccaggtgatacgccctccacccgctctcctcgcccgaagacgcccgcgctcgtccgataggtaatcctcccgtcgtcgtcgtaccacccgcgccaggtcctgctcgatgatgagcgggtcgagatgttgtcgaggtgggcgaaaggtgtacttgatgacagacgaaacaagcccggttcaacaggtccttaaaggctcctaatcggacctgcgtaccagaagaggatcaagtttgacaaaatcaacaaaccgtcctcctccgtatccgtgtgcagaagcaaacgacgagcaatggcgccgacacgaaacactcaccagggtctcctcgaaagacagttccaggcctcccaagtatctccctaggtcgaccatcgtcttgtaagccgacaagtcgttcttgcccttgttctacgtccggccagtttggtttggtcatcacgggggcgagtatcaagtcgtatggatcgcaagagagagaaaagaagagaatgaacacttctggtgctctccttgctcgaggacggcgatgacgggcttacgagttctgtatcggcaaacacgttgaaccggactgccaacaacctctttcgtccgctctccttttctgcatccctgccaggcagggcaggccaggattttctagatcgggggactcggggaccgaagacaacccagcctcgcatacaccctggcaacctgaaaccgagggtgaattccggatcttcctcctcgtcctcgtcctcgtccttcttcttttcgatttcagtatgtgctcgctcattaacggtcggcaaggtcgactcggcaaccacgggtctggccacacgtcgatcagacgcccgagggattctccgggcaggccaatagtcctccaacttgacttccaactcggcacccgaggcgtccgcgaggcccttactggtattcgcagcgggagcggtaccacccccgtcgccgtccagcgccgttcccgtgctaggtggagcttgggcggtatccgagagcaatatcccgctttccgagagggccatcaaaccgcatacgaggtcctccctcttactccagatcggacgatttttttcctccgaggcgaggtttcgtttttgtaacccagtatcagcaaggtcgatatccaaacgatgagacgatgctccgttcaaccggttcacgcttttagattccggcgatgtcgatgaagccttcgagatggaacttctgtaaaccatcttgacgagctcgataggcaccgcagggtagacgtcgaccttcctagccggacccgcgtgcgtacgtccatctacctcggtttgggggttactgtcggtctcgcacgacgtcttgggtcttttatgttgtacccgagtggaagaggcgtgatgatctcgtttcatcggtctcggggatcgtacaggtggacaggcagaagggtcgtctggggagatttggtagatgtctaatacgaatgacggattatatggtatcagcgatcgtcagcaaggttctgcagatatgccttttctgggcctgactggtagactcactctcatcgctcgaacccacgaatcccttcatcttctggacgacattcatccactctcttcccccaactcttcctcccgttccgttcaccacgtctagtccctccgtaccgagcgtgtcgacgtcgccatcttgccgcagcgacaaccccacgccggaagagaggaactggagttccgatgcgatcgcatagaacggattatccgggctcaatagtagacgtccttcatccccgccggagaactctcctgtttcttcacgagcagataggttctgcccatcgccgttgctagacttttccggatgaccgttgatggtctggttcgatgaagcttggtttggctgcgtcatcttttaggtggtgcgttattgcccggacagacgagttgtcgttaaatggggctggacatgcgtcgcaaggatctgaacaggatgctgtcaacgttatgaaccgggcctcaaggtctgcgagggaagaggaagtggtatggaaatgtaatatcgtcgagctgctcccggttcggtcatgatccgagtttatgccgggtcagcctcggcggcttttcgcgtttcggcgtaaaagggtgaccgtaccaccgtccagctacgacaacaacatccgattctccctggatgaccatatcgactgtcatctagctggtgaacccatctactcgaaagacgatgtccgaggcctgcagcgcacgtggaaaagagacaagagaccagacgcaggaggtatatatcgacattccatgtttgacagatcacagcaccgcggtccaccgccgatacagatccctgccctagcataaatgtgcgaggcgatgcgcacctcgattcgtagggataaaaggaaggagcccaaaagaggaatgaacaaacaagcggaaagaaagtttcgtcaagaagcaggggagccacagtcgggttcgtcaggggtcagaaagtcggagaatgggaaacgagagcatcaagagggtcgtgaccatggccggacgactttttgtcgaatcgaggcagactggcgtgtttagccctctcgagccatgttggaagcttgttgctgcttggcagatgactccttcaacgcagtgagctgcagcaattaggcaatatcagatacagccttgagatccatgccaacctatgccgactcacctgcttcgatcggaaagcctcgtaatgagtcaaagcggtcgactcgatcagatcttgcaagtgagtcctatcccatgcaaacccccctgcgtaagcgcctatcgtccacgctccacgaatcatgccgacccgctcacctggtcaaaaaatttctcaaatagacaaactcgcagtgcctctcgtcctcgacgttaatcaccccccacctcgtctttcggcccctgacgggtttgccttcgacgacgacggtacgttcagacccgacgacggcaaagggaatcatcgactaaacgagccggaaatcaacgtcagtttcccgttcccagattgatagcctgaccggatgccaatttgttggcctcgaagcactcaccctgattcgctcgttcagcgcgatctcgtcctcgtcatgttcctcagtgtcgaacgggtaaagtcggatctggtggtaatgcaattcggctcgaatctgccgggaagaaacggattttaggaattccgcatcgagatcagaagtcgtcctctggtgttctttgtccggcaacccggtcgttcactcactcgctccttgaacgcttctcgctcttgcaacgtcaacgagtctgatttggcgatgattggtacgacgttcgtgacctcggccagcttcctcaggacggtgatatcgatctaccagtcggcacttcatcagctcgcatgtcttattatattgattcgtgacgaccatcgactcacgggcttcaaggagtgtccggtagggttgatgaaaaagagacaacagtgaatgcgggtatcagggatgaatcgatcacgctgagcagtgagctcttttcgcaagtaggtcgagtactggtccttgatctgttgagtgcgaaaatctctcgtcctgatcagcggcggtagtttgtagtaaagcaaagttgaacgcacatatcgaacgatgggctcccagcagccttcgttgttgacctgatcgccgtacccaggagtatcgacaatgtttaacttcagcctgacaccgccttcgacgatgactaccatatcgcacattcgaaccggtctcagccactagtcatcggttggaaggagactcgtccgacaagctcaccgtgctgttgctccttgatctcggttgtctgacgcataggtccgtccacttcgagccgtcctttagagtcgatcaagtgagacgcaaagagggtgttgaccatggtcgatttaccaagaccggtctggcctgcagtttgagagcaatcgcggtcatgagttggtcatgttgcccgagtgcgaaagaggatggaaggaatagatgaggaggggacataccgacaaccatcacattgaattggaaacctcgcttgagcaacttgtgttcaatctgtcgggtgatcgctgcggcgtcagggaccaaatgtcagcatcgatgctcgtcacaaatcatcaaagtgacaggacttgaacttgctgtcgaatccgactcgggattgaggttgaatcgctccgtcgacttcagccatgatgttgattcgtaacgggtcgttttttttgtcgatatcgatggatcggggttgccggatttgatcttatcagcctatacgtgtcaaatctaggatgaatgcgagagacgagatgatgattgggagaaaggtcgattttgatgagaatatgatgaggatataggtttgagaattcaactctggtgctgcaaagtgtaaacacaacgagcagctcatatccacgcgacgatctgagcggagactggctgcaccgcaactacctactctacctacaactgttccctcttctcctctcgtctccttctttgtctcgagaaccttgctggccatctgaagctcaatagcaacgacattctatcagcaatgaatgctctgcaacaatttgtgagctttgaccagcttcccaaaaccgaaagatcgcatactgagcgtctttcgtcatcctcacgcttctagggaactcccttgactcgaaacatcccaggtttcctgcgacagccagcagaggctttagtcggagaggcaagccagatccatacaaaggaatatgcggcaattccctaacccatgaattcaacagaaatgctacacttcgctggtttacaacttgaacatcgccgatgtggactgcctcaaatacgctctgtcgaaaggtgacaaacagcccctttcatggtcagattcgaagttacgaggctgattccctcgaaattgatctatcgcgacaggtctcggtctgggcatggtcgtaggaggaggcatcctgaaggttcctcagatcgccaagatcgtctcgactaggtcaacccgggggttgtccttgtctgcgtttgtaagccatcagttacccactccattatctttatctgaccggatcatgttcttcgggttgccttttcttgccaggtcatggagactttcgcctatggcatcaccacggcctactcggcacgcaacctgttccccttttctcaatacggtgaaaacgccttccttgccgtatcggacatcatcatcctcgcgctcttcttcctctacggacctggaggaaccttgcagcccaacgccaaaggattgttggctgttctcgctgggtcgctcgggttctcgctctgggtagctagcgagaccttgtgcccgcccgtcattcgtgagcactgcatcatgttgaatcgatgttcaggggtgctgatgaaccagtccgcggtatctcagtctctgctttgcaggccagtactgtgcctctcaccgtactctccaaagccccccagatcgcctcgaaccaccgacttcgctccactggtaacctctccgccttcgccgtcttcaactcgttcctcggatgtgccgtacgggtgtacacgaccggtcaagagacgggcgatagtctcgtctggtggggatacttcctcgccgctgtctgcaacgccatcctcgtcggtcagatgatgatgtactggaagaacaccgacgcgagtgtgcctgcgggtaaagatttcccgttgacgtcgctaggttataacgatcggaagaaggcttgaatcgagggctctgggtatgtatagacaatcgatattccaggctatgaaatcacaatacacggcagtagtcgaagggtcgaccgcacgatcaggaatcgagcttttttaccagggcaaaacacctccgggaactccgtatgcgagaaacttcccaccatgttcttcccggttcgccttgtcgagaagctggaccatcccttcgatcccgtcctcgagcttctgcggagcctcagggagattcgcaattctggcggcccggttgccaagttcggtctgtaggaagcctgcgtggtaaggcttccatgtcagtgccccgactgccctgttaatccctatgcaagcgaccgacctgggtgataaggaatgacgacgagtcctgtgccctcgttctgtagatgcatctccctagccaacatattgacggccgccttactggtgccgtatgcgccaacgggaatacccgggctgaagccgattgcgccggctccagacgaattgatcaggaagacgggcggcttttggtccttggtccgggacggctgggtaagcagaccgtacgtggcttgataaaggtacagcggtccacaggtattaaccttgagagcctcgagaagttgatccggctggatagacagacagtcttgtagtccgaccagcaagcctggttttcggaaacgtgcgtcggcggattttcgagagtagcgtctgcctacaactcaccagcattggcgatcacatagtcgaggcgatcagtgacctcctttacgtcggaaaccatcttagcgtattgggattggtcttcgacgtcgagctggatgatacgaagcttctcgggatgcatctcgagcagtcccggaagctctccactgtctttccgtgaggtcgcaaagacaaaggcattggatttggtctcgagcagcttggctgccaaagccagaccgattcctcggctggcaccggtgactgataatggaccatggaacatatcagacatttcgcatcacagggtggacacaactgtggcacacccaggtagtaaacaaatttgctgttagtggcgttagagggcatcttcaggtgattgtcgataagtgtcggtgctggcaaaaccacgtagatggccgcttgccgtggattgcgctgtaattcgatccccaagtgtcggactacacctgttctatataatatatgagtcctactctaggcttcgtctgacgcgtctgatgctacgagtaatacgtaatatgccactcgctccaacgaacggtattcgcaaatcaccagtgaaacatcctttcgtctttcttcgatttgattccgcgaatgatcatcaactttgtccggccgaggttgacgttcccccggcgagatcggcaaggaaggccgccaaatacttggcagtctgggtccgagactcactttgagcgagcttcgcttgccatctactcgagagtgtagacgcgatgaccgtaggcaacccttctgaaacagcgcgtagagtggacgagctgctgaccgaaattcaatcaacaatcaaagttcaacaatcaagcttcaacaaaaacaatcaacaatcgacccagctttgttgcatttggtcatggtgccttatcagaaggaaataaaccagagagcctctggaatcaaagcgacagaacaagatgttcgacaatccgtgaatgcatcatcggcgaccagtgatgacgatcaatgatcactttgatgatcactgatcactgtgatcattgattgttgtcatgatcaccgatcaacaacttgctgttttgttgttgccatttggacgcgtctgaatcgatctggcctaggtaccggtagatttgtgctaaatccctgtactcgctaactacttgcacgtaacgtctgactcgaagcgagcctctcatcaagaacgtagcacctaccgcctggctctgcttatcgctcgacaccgatcacagccgacaccgattatgctcgaacgacgttccaaacaccatatcgacgacgcggaagatattattgcatatttctgtagagcagtccagatcttcgacctcagtcacgttgcacgtcacgtcagcacactgctatgcaagcaacgggctttgaaagtctgaattcttggcatggctcacgtctggtccgatgccgacgtggttcatccattgagggtggtctttctcgaatccttctcaccatcggaacttttgtgggtcaaccgttgtaaacgatgcgctggggcacgctactctaattcaaggcgtaggtcacagccatatgttagacggtatgctatagagctaattcattcgtcacgcagacaacgagcaaacggttcttacgttcctagccgacctctatcagctacagcgtatgtacgagcaagatgggcaagagctagcaaaattggagtctagatctagtcacagccagtcctttccgtctatcttcttagtcgatgacatccgggcgtgggcagatgaaggtactgtccccaaggtccctgataaattggtgattatgccagtcgtcgcacaacgctccgacctcaagattgacgtcgatcgcacaggaggaatttcgtgatggaactgttagtgctcatcgaaacaacttctgggcttaggccccgcgcgaacaccgcttgatgcatgcctcgatgttggacaggcgcgagccatacgcaggtttcacccatggatattgcagcccggtgcggacgtataggctgggccttaaatacaaggttgaaccggcatttagaccgtcgtctcgggcgatgctcgtagcgtactagcagatctgctggtcatcatatgtttacgtctttatttcaccggatttgatcgcttgttccgtcagacttctgatcataccggccaacaccgttaccgatggccgaacaatgggccgagagtctatcattaaggtttgaccagatcgcgtcacctgaccattccatcagatccgtcccatagtacgttccttgattctcctctcaacattcataggtcccgagcagtatttcaacagaggacatgctggcgtccaaaggttggagaagtatcaacggtaacgctcctggttctcggcgtggaaagagtccttgcttcggttgaactccctcctgggtagatcaatcccaatgccatcatcaaatcttgtcgcatgacagtaataatgtcgtcgcgtcgacccatgatgtggcaccttcgtgtgccaatctcaacagaacccataatgacctctgctatatcgcatgtcgaaggcgtcgtaaaatcaaatggacctgtatgacttagtttgtccatagtttgtttggaaagaacctccatcgtcaattgcggtctcgtcgatcaaacggttctttgcggttttagcgatatgtttcatccgcaaatggcgggctgtcgcgcgaatcatgaaagatcgaccgagcggtaccataactcgggacgactttacccgtagtgctttcaatcgaggtgtagccgcggactcgagttctgcaagcctcgttaatacctggcagccaatttcgtgaacggcacgaacgctttgactctggcacaaggtacgctttcttcaggacgctggcgagccttcttgcgggtcccggcgttgattggaacgggatctgagttgtttcgatcggaagctgagtttggtaaataacctccgaagcgcgacgcgcggaccgggcggtcctagagaagaaagccatcttcttccttcccgacccgtggtaaagtctaacgagttaacagggaatacgatagtttcggtcctgaaagagatgggtagccttccatagtaaacaacaagcttttggtaaaaataacggaactgtggcgacctgcgacctcgtcctacgttcgttggcgatccttgtgcatcgttcgatggaagctgaatcagagttcaagggatctttcagcatggcatcgcaagcaaagccgacgccagccagggcaacttcccgcatcgattcccacctgtatataaagggtgttcaatccgtcggctcgaccgatgaatctctgcggtcctacgatatccagacatcctcaactatcttgactaccttgccatctcatagcaacattgaacgatggtcaaaagcgcactcgtcatctccgccctcgtagctctctcgggcgtcaatgcagcttcccttcctctcgaagctcggcagtcctcttcagagagatggtccgctctcttcgccatcggcaagcaagccgatcagaccctcaaaagcttgtgccgcggcgtcctggctccgatcactacgacagtcacgagtgagtcgaacgcgtgatcatgaagtgtacgcgggagacgagttgatctcttgtgcttttctaagccacgggagctcctactcaaaccgtttaccagactgtgactgtaccttctactgtcactgcccgtaaaactgcaacgcagtataccaccctcgacgtaagtcggatcgagcggtagatctccacgtccaatagcacttctaacgatgaggaattgagctattagaccactatgaccgagactgttactgaaacccaaacattcaccagcgttgacgtcgtggttattgagacgaccaccactgcggcagctgagaatcttgccaagcgggacgtctccggactggttaccctggcttttaacaacctgtaccggatcgatcctaaatatgtgacgagccgttgtcagcagttgactgcacctgtgagtttcccctgccctgctcctttgggcttgcttttcggtctagccattgactctcggtggaatgaaactgcgcatgtgactagaacacggtcacggctaccaaggtcactgccaggtgagtctgatttgagcagcgacatcggtttcaacctgctgatggagaacctgtatgcagtgccgcaccaactaatacagtcaccgttactactccggttacccaaactgtcactgacgtgagttttcgcgagcgctatccgacacggcccctcccgctgacaagtacttaccgatgggcagactgtcacggctattgcgatcgagaccaagaaggaaaccgaagtcaaggcgaccgacactactgtggttgtcggcacgactaccacgtctatcagcatcctacccgcaccgtcgcccactatcgtcgtacctgagcccgctcccgcccctacttatcccctctacatgaaccccatctcagggatggatgctcggcccgtagccaggttggctctctgggacggagtaggcgacggagtgagtgctcgaatagacccccttcatcgcattcgaggtcttggacgctgatgagataggattcgattacagttgtcttactggacgactggaagtgctgatgaatgtgccgaattgtgcagcactcaatggaccggctgtgcgtggatattccactcccccgctcgaaaccctgatttcggcggatcctgttacgctcgaggcgccgcgggtgtgagcgaactcttccgtgcagactctagcgacatcggttcggcggtctactggttgggcacctgcgagtcgatcaagaacgctggtctcgctccgatcgaggctctaaaggactgttcggattcgtacaatacgatctgaagaacaagccctaaagagtgttcaagaggagaagggtggaaaaggtgtcggattctacggcgtgtttttgagcttgtatcccgggtttcatggggttatttttcacgtcttgcgatcgttcgtttcgccgcgcaattccacatgatgtaagctggtcagacgtccagtcgatcagtcggacattttcgctgggtgcatcatgttgctgtccgtccggtatgatccgacgattgagaccaacacgaagtcgatgtacttagcttccggtgccgacgtcatctgggaagaaaagcttccggcctccctcttccccctgcccttctcgcctagttgatgcccgggatgacgagaaagttcgagctttagcgggaaatgtcgagcgacatgtaacacggatatggtgatcaaaacgatcagcatatccctcgtcctatataactacccatactacgagttgcacaacgtaatccagcgagttgaaggtaccgagttactagcacgaaacgagtccgacttgcacgcaaaccaaaactgtcaacgtagacaaaaccacgcaaacataccgaaacacacctacctgaactctctctactatcatcatggctgacgatctcaagcttacggatcgctcagaacaactcatcaaacaagccatcaacctcgccgagaacaacgcggtctcccaagtccaccccttgcacatcgcttgcgcactatgggaaccggaaatcgatgacggaacgacgacgacggcggctcaaccgtcttccctcttccagaccagctttgaaaaggccgggctggacaagcaggtattctcccgaaccctgctcagccataccaatcgacttccttctgtctaccctgctcctacaccgcctctccccctggctcaaggcgtccatgtcatcctacgagcggccatcgccgcgcaaaaggaacaacgcgattcttacgtcgccgtggaccacctcctgctcgccctcctcaaggtgaccaaagacgtcccggaactccgttccatgttcaccgaggccaaggtggacgaaagagctcgaaaacgcctagaagacgagatcagaaaggccaggggaaaccgaaaggtcgatagcaaatctgccgaggaagggtttgagagtttgcagaagtacgctacggacctgactgctcttgcggccgagggcaagctggaccctgtcattggaagggacaaggaagtcaggcgcacgattgccatcctgagtcgacggacaaagaactcggccatcctcatcggggaacccggagtcggtaagtgcacttcacgacgttttccgttcaggtcgttcttgccgctaatcgttgatctggtcgtcacgcaggcaaaacttctatcgtcgagggtctcgcgcaaaggatcgtcaaccgagatgtccccgccagtctgatcggtcgtctcttctcgctcgaccttggcagtctcatggcgggtgccaagtacaagggagagtacgaggagcgggtcaagggggtcttgaacgagatcgaagaaaagtctaaagagggagagaacatcatcctgttcgtggatgaggcgcatcagatggttcaaggcaaggagcaatcggtgagtgcgagcgcttttgtgcggtttggcacgggcagaacagagcgggatgactgactcgacttttcttcccccgcaggcttccagctttggagagtttttgaaaccgctcttggcccgtggtatgctcaagtttatcggaggtgagtctcaagcatctcgtgttttgcttacggaccgggaactgacccgcgtcgactcatgcgtgcagctacgacactcgcggaataccgagaattcattgaaaaggacgctgcgctggaacgacgactagctcaagtcattgtcgaggaacccgatatccccgccacgaccaacattctgcgtggactcaaggaacgctatgagacttaccacggatgccgaattaccgacgctgcactcgtcctcgctgcccagctgagtcgacaatatatccccgctcgacgggctcccgactcggccatcgacgtcatggacgaggcttgtacccaagtcaagatccagcgagagactcgcccggaggccatcgacattctcgaacgccaaaaggtcactctgcagatggagatccatgcgctcgaaaaggaaaaggacgacgccagcaaggagcgacttgaatccgctcaaaagatgctcgccaatgtcgaggaagagttggcgcccaagttggcggaattcgaggcggagaagagtcaggccgatcgggtgcaggagcttcgacgcaagatcgacgagctgaaagccaaggcggatggtgagtcgctcggacaggccagccgaaacgcgtgcattttcactgacacaacacctcgtgacagatgccgaacgacgatacgacctggcatcagcttcggacattcgatactacagtatccctcaacgacaaaaggaactcgccgaactcgaggccaaagaggccgagaagaacgcggacggcaagtctggcggtgtcgttacccctgaagccatcgccgaggtcgtcgcccgttggaccggagttcccgtcaccgcactcgtctcgtcggaaaagcaaaagctgctcaagctggaaaagaccctgacaaagtcgattgtgggacaacctaccgccatcaaggcggtctcgaatgcgatccgactatctcgatcagggctgaacgaccagaaccgaccgatcttctcggcgctcttgacgggaccttcgggttcaggaaagacttcgctcgctaagacgctcgccaaagccatgttcaacgacgagaacgccatgatccgggtcgactgctccgagttgagcgcggaacacagcatctctcgtctgatcggatcgcctcagggttacgtcggaatgcaacaaggtggacagttgactgaagccatccgaaggaaaccctaccagatcgtcctctttgacgagattgaaaagggacacgccgcactctacaagcttttattgagcgtgctcgacgcgggagtgttgacgagtgccgttggtctcaaggtggacttcaagaacagtgagttgtagatgagcgggtcggattgcctttgacattcagctgactttctcctgttcacttttacagcaatcatcctcttctcgtccaaccttggaagtgcggcgcttgccgaagacgcttcggaaggcgaaccctctgataatgccaaggaaaaggtcaacatgtcgctacaagcacacttccctcccgagtttttgggtcgtgtaagtcttcgatgcctgccaaaatatctatgccatgcgtttactgactgacactatgtgcatctctatagctcgacgaagtgatctacttccgcatgctgtcgcgatccaacatccgctctatcgtcgaactccgtctcgccgaagttcaatcccggatgatcaagaacggacgcaagctcaagctcgcaatcgacgacgacgccaagaacttcctcggggacgccggattctctccacaatacggtgctcgaccgttgaacaaggtcatccagcgtgaaatcttgaacccgctgtccaagttgatcctccagaactgcatcttggacggcgaggtggtcaagattcaggccgatttgccgaggaaccggttggtcgtcgtgcccaatcacgagccggaaatcgtcgaggatgaagacgacgagatggatatcgacgacgacctagagattgaggaagtggactaggagaagaggtggccatggacccaaagtgacgagtttgctatttaacgatcgatcgaaaacgcacagattctgtagcccgtagttgtgcatattgtagattagatacagtacgagcgttgccgtttattgagaaccaaattctctgactaattcaagttgtgatatacactatatcgctcctatatcgctctcagagaccagatcctggcacggtcccctcctgtcagagcttggtacgacgccgacctcggctgctcgctgctcgccaaattccatgtcgcgatcgcgtaactcgggtaaattcgttcggcgacatccgacacttgacaaggtcggagggtccagggtcagtcccaaggtgacctcttataaaggttcccatgtcgtgtcgtcgactcgtgcctcgtcatgggcccatgattcggctttctgtctggttcatcaagtgaacatacaaaagatgagtgaacacgccgaattgcaccaaaaagatcagcagagtgagtaccctgttcgacaggaccggtgacctgtcgacacggtgttgacctttggaaaccttggtcgacaggttgggacaagcgatggtcagtccggtcgcctttcttctgccatgatcgctcccagtcttctcacccgctttgtgctggaacacagggagaccaacgttattccctttgacaaaggcgcacctcatgcggcctttgcggacctcttggagaaggccggaacggacaacgtcccggatctcccgaggagcgggaaggccttggtccccggatgcggccgagtaagtcgtcatggattcgatcttctagccatcaactcaacaccgactgtcttgattcgcggtctcgatgttcgcttgtatagggctacgacgtccgggctttgtctatgcgcggcctagagacgacggggatcgaggtctccccgaaagccgtcgaggaggccaacaagtggcttcaagggcaatctgaacagccgaagcggggttcaggcaaggtcgagcttggtgactttttcaaatggaaggccggcgaggagtgcacatacgaggtcatgtacgattatacgtaagcgatcactttgcagtctcatcccttgcgtgtgataagacgtcggctgacatgatcctcgtcacataggttcttgtgcgctcttcctcctaccctccggaagtcctgggcatctacctacgcccgactctctcaccccgggtccacgctcatcacgcttcaattcccgctcaacgacgagggggagacggggcccccttactccctttcggaaaagctgtacgaggagttgttgggagaacactgggagtacgtctggggtagagaggtgagggaggacgagagtcgagcgatggccggacccgaggggcaaggggtcggcgtggatgtgaatcggttcagaaaggggagggagagggtagccatctggaagcgcaagtgagtggtgacggttcggttgtgctcgcgatgaagattcatctgtagggctgattcgcgacgacggttcgtagggatacgaacaaggtttcggccgggttgtgatgatgttcgaagtaaacagtatggacaagcataaatgcatgtgcgcgacgtgtgcctgcccaggttccccatcatcgactggtcgatcagcagtccgacgtagaaagccgaacggtccctttccatgccgtcaaccacatggtgaacctgtcggtagccgatcagctcaacctcgagcatgggtgatcaactacgcctcgtctcgcccgggccgtcccttgctatcttcttcactacctcgatatcaacgctgtccttgatttgagctcttgtgtccgattctgacgccggagaaatagccccagttcatctccatagtactgccaacagctctaccggacgatgatgcagaaacatgtgtgaccaggctcacggcgttcgtcaccataaccatgactgcgcttagggagtcgcgctctcgacccggtgcgacctataatctataatcaatgctgatcgaggtgtaattcaattcgacggacatcctcgcaagcatggtcgactcgattatatcggcccgctcggtatggcgcggtccgaccgagtgatagcaatcgcccttgacgccttcaacgcccttaatcaagggaccggtccgagcgatggatcgtgttgagaaagatggaggccgtcggggatcctgaacgacacaaccaattgtcaaacagacttcgggcgagtcgtcgtcatcgttgttaaagggatctccaccgaagaccgataaaaatcctctgacttgatgaccgaccggtcaatcagtcgcgtaattcgcgcaatcgcaggtcatgtcagaagtcggcgatttcccaacgaggtccccttgcgagatctgtgaccgactatctgcggagagattgatgcttgacgcttgacccttgagtgatcgccgtgctcgggaagaccacccgaacctctcttgtctctattctgcatgtgatagccaagtgtatcctcaatcaaggtcggtcgagctcggctgggcacgttgtggcgcgcgaggtgtcaggttcggcatccattcatcacgatacgagacgatacgatatgatgcggtacgagaggatgggacgatgggacgatcgacggtcgccggtcaccgagcacgatcgacatccacgggggcgacgtgtacctttcggggaaacccctgcaaacccgttgcacccgcggggtggggtggggggggtgtggcctttgcccatcgtctgctcttctcagctgatcgcgggttcagaagatcgaagctaccatccgtaaaagatcgctggccgcctcgctggcctcgtcgctgttggctcggccgttgttgtcgggcataaaatagcgcgtggggacctccactttgttcttgttttcgtggtatattaaggctcggcccggcatatgaaggcgtggaaggggcggggcggacggatcaaagcacgcagtctttcagtgtgtagcagggcaaggggcagggcgaaactgagggaaggcgcagacgtgatggagggaacggcgacggggaaatggaagcaaaagaagaagaagggggtatggaaaaaaagttgggaaaccctgcaatcgatcagccaaaaaacccgggggttagggggacgcgacacgttcttggtacatcgaggctgcgagcgacaaagtctggggtatccacaatcgatccgtatgtctctatctcttggatggcttggatggaatggtgtgatcggtgtgatgtggagaacgaatgatgagccgatgggagacgggggcggtttcgtgcggcattggcattggttcgcgctgcaaggtcgagaaagggacctgggctctcctgctctctctcggttgggtaaaatcgcgacgacggcaaaggtcgggcagccaagggcagcgcagagcagagcagagagggccaagtacagagagagtacgactctcggtctcggtgacccagaaatttatgtgtgtgtcctctcgatcgtccaaagggaatcgtcgccgccagcgagacgatacgtcttgccgagtgtggtccatccgttcagatcatcgtgttgtagcttgtagccattcacctgaccattcccctgtagccctgtagccctgtagctgaacacacggtccccccccgtaacattcgaccgaacgacacgcgtgcccgtcctcacttgcgctcccctttccaaaaaaagtccggggtcaccgctcgaccgctcgctgtgggaattatcatttcattgtgtctgtccgtgtccatcacctacgaccgcgactcgaccaatagcacctcgatccaccctcatcggcagagagaacgtctaggtagtgatcgacctctctagcgatagaatctccatagttcggggttcgagggatctaccgtcacgggttcaacacatcgtcgtcgctgcacgcatcacgagctttcgagccggatttgacccggatagctgtccatatttattctcaatcaaacggggacgaggtggatctcgattggcaaccacccacgacgacgacgacgacgacgacgacgacgacgacgacactacaactcatcatcgcctcgatcaagatctttctgatcacacgagagagaccctcggggatagaaacaagcacggttctcgaaataggacgaggacggagaacaagggataattacacctgtttacttcgcacagctttccccctgaacttttcgacccgcatttcacggacctctcactgcatcggctcctgcctgacaatcaaccggctttcactaggtctaggatcagacgagtccgattgaagtgtccttgacggcgagtccaggaggaggaattctcgcttgattagaaatcgagtcgagtgaacggccggggccgaggacccagacgtgacgtcgaagggttggatgcaacgtcctaccacatcaccacaaacaacaacaccttccataccgacgacgaacacgaacacgaacacggtgccgacattaggaatgactactttaggagccgaacaggtgtcgagcggagagtcgaggtctcaaggcgagacgcagcaggacgtatcagggacgggcgggaccaaggttagtagtaccctggggaatttgcgggtgatgggcgtgcgtccggagggatgatgtggggtatggaagaggagctccaggtggtttcaagggtggcgaggtatgctctggaaatcgataccaccgacgcgacacgaagcgcagtagtcgtaaaagagttcagaaaagagttcaaggacgatggagcctgcctcaaagtcgaccgcgccgctagcggttgctaccacgttgaaaagatctctgagctgatatcacctccatccgtgtctgatgcagaactcgtcgtcggcctcgacatcacggtcgacaccaacaacagacgcgacggacacgtcgggacgattaacgggcaggccgtcgaacccgacgagaaagttgtccggcctgggtgagtagcaacgaaaacctgtcccgtcggtctccggctgacccgtctgcaaatagacctcttgatctcggcggcacgtccagcgaccgcatcgacgacggtcaagcaacccttacctgccagcccggcgcccacccagaacggcggcagcaagccgaatggcaaggtcacgcacacgcccaacgtgttcagctcgtctgtcccggcgtcccgacccccgctcaatcacgggtacgtgaccacgacggccttgcccacgacgagcacgacggcgagtacggtcgggggtagcatggcgacgagacgatcgtcgggcaaggccgatcaggcgaacaaggcgccggtgctctttgatttccgcacgacagacaggtcaccctcgtcggccaagaagggcgatccgacggccagtacgggcatgtccctgttgagtcagggactcaaggacggacccagcccttcggcgatttccatgtcctcgtcgccctcgacgcgtcaaccgttcccacctcccgtggcgagcaacaatgccgcggcgagtgggatcttgcgacggacgagtacgtcgggcgggaagagcgggatctactcgcccatgcctgcgccccggatgcgtccacgtgcgttgtccatgcagatgaagatcaagggcgagatcttgcctgacggcgcgtctgatgacgaggacgacgaagacgaagggatggtcgttgatggagacgagtcgggcgaacgtggcaaggctgtacccctgggaaccggttcgggcgggatcaaggggaagaggaagggcatggtctttcgatgcgagagctgtgccaaagtgtatcgtcatccgagttgcttgagcaagcatcggtgggagcactcgccacactgggcgaattccagcaagttgctcttgtccaagcatcaacaggtgcaattgctcgaggtgagtcgacgggttgcaagcgatggcagaagacgaaccggtcgctgagcctagggtctggaaaatcgtaaaggcggctactattttggtccatctagatccgggcaatccggccggacagggcaagtcgctgccagaggacaagagcctctggcccgcagcaggtgagctcgattccgcggtttcctcggacctttccatttgttgactcttcgactcgcctctagtttcacccgctgtccgtaatatcaagctgccgactcacgggatatctccgggacccaggtcgcctaatccgaccgcctcgtcacctttgccggacgcgtccgagaatcacgttcggaggacgtcgccggacgattcgtcgtcctcgaccgaatcttctgaccgtgctcgttcagttgaggctgacagtggttactcgagcggacctcaacacggacgactgctcgacattggcgagacgcctcagcgtcgaggttctcaattcggtcgggcttccatctcgtccccccttggtcatagcgtcgggtctaatggtcagggcagtctacccgatttcaacggtttccatatcggctctccccagcgatatcctcttgggacgacaccgacccatggatcatcgccttacaagaccggcgggaaacctcaatcattcggacattcgtacagttacggctcctcccatacggcgcgagcgggtctgttcagcccatcctattcccccgccctcgggctaccgcagagttctttacgtagcgggacctttttggaacgacacgacgaggattccgcggaagaggacgaggacgatacctaccgggatcgataccacggtggtaaccagaagcagaacggcgggttcgccagtcggggtcagcgtgagatgagtctcgatcggacgagtccgagtccggatggcgatgatatggacatggccgtcgacatggagatttgatccatcgtcggccttttcgcgcctttcccagcgtttgcctctttgcctattgccttcttcctctttccatctctcgctctcgctctcgaccatctttgcatgagtctgtgcacggctaggtgatcgcagatgtcacctcgaagtcagtgtcagtgtaatgtgataaataaccaaccaaccaaccggggtcatcagtctatccttcctcccccaccccacccacccacccgggttcaccacgtcatggtctcttcacgccgaaatcctgacgacgatcgacgggctgagagctcttcagggccaaagatacgagcattcgaaaccatccgaatctttgcgagaggttgggttgatcatcgcagtattccacgttctagtctctctattttatcaacatgtccagccccgacgcaccttacacctacgctcagaccacgcttgtccgagcatcaccagctcagaccctttttacgcggcaagatacctttccactatggggaggaccaaaggggttcgacctggagacttaccttgagcgggaccgggtgatggagcgagaagaatggagcgtggactcgggttttgttacatggtgagtaccgggacatcgacaagctagttccagaggtaagtcgagctcaacttgtttgctcactcaacagggtgctcgtcccaagggatgagacggagaccacggagaagattttggctcattgcgaaacgtcagtattcacttgttctcagactcttccctttggcccttcaaaagctaaacgttttcatgttcatcttaggtaccgtcggccttctcttatgcgtctaccctcctctcccgacatcacggaggtacaaagcacgggcatagcctgcgtctttgtcaatccggcctatgccaaatacaagtacgccaagcacatgctttccctcttgcactacgtccaggccaaggaggaagacctaccatcgttcccgggaaaacaatggggagaggctccggtcgtcgccaaggactggaagagggatgtcgccttctcggtgagtccccatgatctcggctccgagagtcgacgacgtcgattgctaatcacgactggtatttgttggtaggtcttgtacagcggggtagggaaatcttactacgcctcggctcggatgggtagtggttccgagagtcttccaggatgggttttcaagcccaccccgacccggacgattcattttgacgtctcctgtacggagtcgacctcgatctcagggtcgcaggtctcgggaggatgggaatacctcgatgctgaaggggtcagggcactggagggcaccgtcgcaggacagatcgagaggcagttgatggggagaggaacgggaggcaaagctcaggtggccgtccttcctaccaagtaggtgtgattcgctgatctgctacccatgccatcaagttttgtctagagatgctgaccggaccttgcgtcaatcagggggacgctctattcgcactgtcttcgtgacaaactttccccagtcacactctctgtgggtcgatctcggacgtacggcatgctcggtcccgtccccgagtcagaagacaaagacagaccgttcttcacctacttttacgaatcctcgagcacctcaccgccctgcatgtacatttcgtacatctcccaccatgtacccctcgacgtcattcatcaggcgatgaggcacgagggatgcccgaccgcagaggtttggggggaagatggcggggtttacgaggggaaggaaggggtcaagtcgaaggacgataacatcccatgtttggcggtatacggtggtctgaaccctgacgaggtcgactggcaattcaacgacaagtgagtcaggatttgtgctgatgaggatggggggtgaggctgatatttggtgttctctcttcgtactcgttgtcaaactgtaggtacgtcgcatgctgagaagtcttggtagagtcaaacaagatcaaagatcgcatctagtaggagtggaaagtgatgggtagtattcccttctttaggtgctgttggttgtatagagaaacagtatctaggcatcatcgttttatttgcatcgtcacgtcgatattcttggtcgcatcaaccatgatcgactcgaagctcgtatcgtttggcggcagctgcgatccggctgtgaaactaaaacgtgacgtttgaagcgataatctgtctgtcccaatagtgacgcttgatacgcatcaggaggtccgcagggatcgcatagaattgcatcgtcatgcggagcgggcgcctgttttcgagggctgaccggatcgtatttcttaccgaattcgacaccatgcttggtcgcccgcgtaaaggcgcgatacgctggggctgcggtccgagttgtccgtcatcagagatgctcatcaggcccgatgataccaggagccacgtccagcagccaccagctgctattctgattcaacatcatgtgagggactgctagacgatagatttggcatccgaaaaagcttccgattcccggtcggtctcgcctatcagaaccggtttccccgtgccgatagagccggaagctactgaaaaagccggtggcttgctgtgatcgattaaatttgattccggtaataccttcgggaggtttatcggatcttgaaagggaccagccggggaatcccgacctcgtgatctctggccaatgaccacatgcttgattcacatgggtacctggcctatataggtgtacgggaggtacatatcgagtcaccttgcaatcatattgtcgatgtgccgtttggcagctgtatctgaatcgttgcctagccataatgttggctcctgctcaagatcatatcgtcaccgttgccctggtcggcgcgggccaacgcggaggtgtaggtcgatacgcaccgtcgtcttcttacctttagacaagcactgagtcgatatcgatgcccacctccatctagatttacgccgactatatctcgcagaatccagcatcatgccgcctcgttgccctggccgaaccccgaccgacgcggcgttccactctggccaagtcacactcgatccctgaacatctcgtctttcgggactggcgtgaactggccgcccagggtaaagtcgccgacgccgtcatcatcgccatcatggatcgaggccatgcagaggccgtcagaatctttgccgatcaggggtacgacatcttgtgcgagaaaccgatcgctacgtccatcgacgagtgtgtggagatcgtcaaggccgtcaagcagaacaaggtcatctttggctgtggacatggtgagacgactcttcccctttccagcccatcagtcacaaacaaaccggaacgccaagaactgacctgtccggtccgcgttcgtagtcctccgttactcgccctataacacctctatccgggagacgatctctaccggcgtcctgggcaagatcatcaacatccagcacctcgagcccgtaggcaggcagcatttcgcacattcttacgtcagaggcaattggagaaacgaagcgacggctagtttctcattgatggccaagagctgccatgatatcgacatcctgaagtaggtatctcctctccattcatatgcttcgcactcagaagggaggacccaggctgaatcatccccttactcgtcttatcacagcttctaccggtcagaccagatcgaaccccgttcactctcctcgtttggaaacttgaaccactttaaaccttcggagaaacctcgggaagcaggggatgctacccattgcgtgggatgtgattacgagcctcagtgcccttattccgccaaaaaggtatgtcgaagtgctcgaggcgatcgttagctgccaataactagctgatcatattctttggtgtatcgatcgtgctggcgaacagatttacctggagccggtctatgatggtcccaagagggatagcggggatgatatctgggcgactcatatcctggacgaacctcccgatatcgaaaacgtcgccgctgctatccagccggacgggatcgcaggaggaaggtggggcaagtgtgtgtattcgggagataacgacgtagtagatcagcaggtacgtcggctctccgttgttcctatcgagacgatgccatactgacgtacagcgaatcgatgcaggtggtcaacatacagtaccaggacggcacgacggccagcttcaccatggtcgcattcactaaacaagtctgcaatcgtgtcacccgtattcacggctctcacggcgagatcgtgggcgacatgtctacatacaccgtcaccgatttcaggacgggcgagtccacacatcatgtaccacgaaacgaaggtggcggtcacggaggtggggatatgggtctcatgcggtcgtttatcaaggcttgcagcgagcaggatcaggccgccctgggcatcgagccggaggacattttgcgaagtcacttgatggtctttgccgcggaagagtcgagattgaaggatcagaacgtgctgtacgacgactttcagaagaagtgtttggcgggagtggtcggatgagcctcgtttgtagcgtttgtaaatgtctttagcccggaccgcaaccgttgtaagaaaaatacatgcgaagttacgcgaggggcgcgatgacatgctatcgagtagcgagcagttcgtccgccaacacgtcaacaacggttcccgtcagcaaatcctcattgagcaggtgtattgccctttcctcagtctctggtactgctcagagctacctcctttagatgattcgtccttgaatctcctatcctccgatccaactccctgcgacctagaggtcccggtccggcactagataacccccgtgagctcggacccacgtgtttcgggaatcccgccgaaactcgcctcgacgtcccgggtcaccctaagatacgtcgccgaagaacgaatcgatggggattggagtcccttatataccatggtgcataccagaaagcggaaagggtcagagtggagcgatcgtccggtcaaatattacgattttcgagctttatcgacacgatgatggattttttcccggtcacttggagtatggggcgatcgcatggatcttcgtaagtccgtcaactctcgcaaaggaagtaatctgactgacggaccgaacgtgtgaaacgggatgcttagaaggatgtatgaaggagatttaagcctgtgtcggaagttgaaagatgataggaccaccatgcgaatcgtctcggcgcctagcagttcaagaacgagcgtatcttctacccgagagatcttgttggaatggcaagacgtcctgtcgatcgtcggtgagcccgaaagcctcggtggtcacaagtttcacgtcagtagctaactgacctcgacccattatcggaatggaacggaagacaatggcgatctccataaattctatcgcctcccgtccgtcctggaaacctaccttgcccacctgaaacggatcgcgctcgagtacgattccgcccgaaactacatcatgcgccaagtcctggagtggtccgaggatgacctgcttggagctccagcaaaggctatccggctggaaggttgcgatcatacgggaaggtgtgaggatgatgaagggtggtttgaaggtgatcgtacggattgctcggtgcaaaagactccctttccttatgctgtcgcgccaggtgagtcgagttggtcgaataggtactgagcatacgatggtaatcatcactcagagacgctaagcccaatcacgtcgtgttcttgcagaggttacgcatttcatcgtatggtcaaaacgacctctgcttcacccctgcatcgtgcccaagcattttccaaaagaagtgcgattggcagcttggcgcatcattcaaacgcgaggactttccggctttttcccgccgacctcctcgaacccgccaaacacgattggacacgcatatgacgacaatgataccgacgagcttcagattcgcatgtcactggcagaatctagccggtacttgaggacgttcatcggatcagagtggaacgaggaggaatttgacgtcgcttggtttgccaatcctccgagtctgcagagcttgccgacattggcacattggcattgcatggtcaggaaacgagaataatcttgaaagttcgaccccaatctattttagggcttgagttttgtagtagccatgcgttgtatcacatagcccggatatactcaaaattggattctcaagaccgtgaaaaggcgttgaaggagcggtcatggcgtgaagggaatctgttgcagcctcatctgatcgggagttgagccggtagatacgggtcgattcccgatttaccgataatcagctcgcaactcggccgacaactgtatcatccagacttatcgaatgctaccggccatgaccatgttatgtcttgttatatcagacgtacgagcgtcttaggagggttaatctgggatcgatgatcagctggaagctaggaaggaccatcaacttccaacgggaccaacttacttccgaacggagctcacctacaaagacttcataacaaccaactgcctgtaatcgttcaacgagacatgaccaacgccaacatgaatggaacaagcggctaccatgtctgcatggatgcaagtcatggttcacagcaacgacagcaagtggcgacagtcgctgattggttgcgttcttcgtctcatcttcataggtcggggggaccaagatcgcagctgtgatcgcggatgagcagggccgacaggtctctcgaggttatgcaggatcagggaacatggccgaggtgagcacaaccttaccttacacactgccctgagagctcgagggaagggaatctgatagtcgtgcgccaatgcctagcttggggtagcgctctcatcccaaaggtaagtgatcttcatcgcacagtactcgtcaaccggctgtcgagctgatgcgaaggcgctcgaatcttgaccacgggcaggatcaaacaagcagtgcttgacgcgtctacccgggtcccaggtttgcccacctcctcatcaccggatggtcagcaggtttgcccgttccccatactttccgcctgggcaggagtgagcacacggccagctcgtactggtgccgacggctggctcacttgacaaaccctttgcacctagattgcgggatgtgatagcaaggttgacgtcagtcgtatggaagcagccctcgatgggttcttgtgagtgatcccaggtcctacagccaaaactccgggccaataccgactgatcccctttcccgcaatctcacagcggtcccattccggtcagggtgacaaacgattctctcctcctctcggcccctatccttcgatcgtctgcaccatggggcatctgcgtagtagctggtacgggatctgtcatctcgggggtggtcaacgaggatggtgtacccgtcccgttcgctcgacgaggcgggcacggtcacatctttggggacgagggttcaggtcagtcagggttataggtcttgctgcgcttcaacaagatatgcactctgatggattgaccctggttacagcttatcacctgggagtcgtcgcggtcagagcgatcacgaacgcgttcaactgtggagaggacttgtcttcgagcctggtcgtcaaggagatttgtgctgccgttgatacggacagccctggcaatctgacttccgtcttggtaagtgatagtaaccaacccacgttccttatcttgacttactcgtctacccaaactcgctgcctgtagcacggactcgactccggtgtcgatctactcaccgcggtgaatcgacgaaaactgcgtatcgccaacttggccatccaggtcatctcttccgccgcctcgcagcccgaagaccctctcgttcaggagatcatcaccgagactaccgacgtgttggcaggcgagatcgcacacattgtcaagattgccgagaaaaggggtctggcaccggtctcggcagccaccctcagcgtggtcggcgggctcatcagtcagccgacttatatggccgcggtcaagcaggccttaagccggatcggggtcgtctttggggacgtccagttgattcaggacgcggcaggagaaggagcggcagcattagcaattccgcacaagtagactgggtaatatcgagcgcaatatatatttccccttgtatgatacaactatgcatggatcagaatttgtcataaatgtccggaggaggatccgtggcggacgtgttgagccagctcagaaacgtaggtggccacgtctcggtcgacttggtgagtgcgtcttgtatttggaaaggttggggtggcagtgggacgggttgtctgcccgtgtcgtgatttcgaggcgtcatctggtttggcatgccgggggtcggtcgcatctcgaacggcaattcttcgctagtaagcatcctcgtcgagggtggtaaaaacgatgggtcaaggtcgccaaacaattgctcagggtgcggttgttgaggagtctgattcgttgcttggttccagatgtgcatatcttgatcgccttggatcatgccagcggaactcatctggatgggggtgaaaccgaagggttgctgcatggatccaccttccatcatgttcatgtcattgcttaggctttgcatgtttaaccgattcgtcgagccgaggatctcgagttctcggttcagacacgcgtgcaattcagtggcgaagcccctcaagtgtacgagctcgagattcctcaagtagaccataagctgaagtacgagctgaagatctgaagaaccagagcgccttcagcaaaccggtcgtcgttaggctatcaaatggtggtactgaccgacgacgttgcgattaccatcattcccatcgtccagcacgtgaagagcggcgctggtcaagagctgagtgagcgagactcgatcaacaaaatgaacggaatactctcggctcgaatcgactgaccacgagctgataagggaacgccacggtcaacggtctagcgacgtggcactgcaatactcttcgggaggtcccaacgtgatccgtgcccgacatggccgaatgccgactggccgctatggattcgataacaagtcggtccagcagatagggcaagtcgtctacatcgcacccctctgaagcttagcctcatgtaacctcatttatatattcggaattggttctcgtaactcaccctgctgatcgtacctctgcgcgcattttctcaactgggataaccaattatcgagcaccgccaagtccttgatgctgacttgcttggggtccatcatactccccctcgccaatctcctcctccaaactccgtccaagatcgagctgaatccccggctggcaaagtgtttgtacccgatctcgttgatcttggccatgtcttctgcggcgcttgggaaggagacggccgagtggcccgagaacggaggggcgggtggagtggtagatatgatggaccgcttgaggtgtaaactccgatgttgttggtcaacgttctactcgccgggacgtgatcagccgggaactcgtcgtgtgcctcacgtcaaactcacatagaatgcgtcccacagcgccctccattcatcttcccggacgttttcacccagaccgacgctatccaggatgacttgatgagcccatgcgatgtagccggacaaggaccgctttcccccgacctcggcttggcaaaagatcagcaatcccagggcgtccatgtacccctttctgtcctcctccaggccgagtccatcgatagtcatgtccgtcgaacctgcttgaggatttcggtcgatattgcggtccatgtccagttcggaaaaggtcaagtaaaacgttttttcaaaagtccgggtccattgggtcgattctagagtcgatagcgatttggaagtgaccagcaggatcgaggcgatcaagagcggggtcaggtgagcgggattgagacgttgaagtcctgttcccgtgtagggcaagaaatcctgctcgaagctatcccgtccgatcgataagggatcagttcgacattcgatgactctgaccagggcgggagacacatgtcattgactcgcctattccacagtccctcgacggtgttgacagaccatccgggatccttcttttctactcccagtccgccgatagtcagacggttgatacaccgcgctatcaccttgatcaattcgggaagatcgtctttgtgctcccagatcgatcctaccagccgagattgtgcgatcttcgtctcctggttgataccggtcgtatcgttgttgttctcgcggccgcttgtattacggagcagccctggacggtccttgttggaacttcccgtcaacctcctcttcttgcccctccctttcctctcctccattccatccgaaccgagatcacccgccaagacgcccaattcgtcctccccctcttcgtcctgatcctggtcatcgtcatcatcatcatcgtcctcaacgtcttcctccctattctcaccacccgtaccggattctcctggacggagaaagagggctttccgtcgacgccaggatttcacctcgacttcgaggtcgtacagacgcatctcgacctgttcggaccatcccgcatgactgtcgtccgggcaggaggaaggtcagacgagacggggtgagtacgcattatcagacaacgatgcactcgagagctgtgaaacgagacgctcactcggtcccgattgcagcgttggcacggagggtgaatatacagttcttccccgtcgcttcgcagcgtttacacggcggcgtatcgttgttctcgcatttcatctgggtcacccgggatgggataggatgcacggcagggcacggatcagcaccgccgctgggatgaccccctccgccaggtcgattctgtcgactcaccttgtgtttcctgcaattgactgtgtttttccgggtaggaatgagccggagtactgtttcgaggttccgttctgcaaggcatttcgggacttacggcaggcccggctggaccggttgaccttttcgttggtcgttgatccggacattttggtcgacggttgtcgagcctaggcgtcggatgtgtacgatactttcgactgagacgtatccgccagttgttgatcgttgtagagcgacgatgtgacgacgacgacaacgatgacctgaatctatcatgatcgaaagagtttgattcgatccacctctttcggtcgatatccccgttcatttgcttccgatagaagatccagtttgatggggaaatacttccgtcctcgcttgggaagcgaatttacatccgatgacggaatctaattttgtggcgttttagccgaattgaccgaatcaactgatcggcgagtttaccgggagaagcggcgattgggatcgttgaatagtaggtcaaaagcgttggggtcatgtcagagtaggacctcagacacccctgtcgatcgctagagtagcagcaggatcaaaatagcgaccatacaacaaacctacgtgtgataatctattcgtaactatgcgtctcatcatccggcaagtcccgcccgactttcaggccatccccgctcgcccggccggctgacctctttccctggcccatcccgaccccccttttgaacaacacagcgacgacgaccttaccacgtgttcctacgtagccgactatatcgtaaaacgtatcaatgccttcgagcccacgcccgaacgcccgttcgtcctcggactccctaccgggtcttccccgctcggggtgtacagggaattggtcgccgcccatcgagccgggtcgatcagcttcaaggcgagtacgaaggaaacgtacgtggggaaagagtagcaggtggactgatatcgtgttgggtccgattggggccgatgtcgacgtgcgggggctgatacagaatgtggtcaccttcaacatggacgaatacgtaggattggacccgtctcatccgcagagttatcggtcgttcatgcacgagcactgtgagtctcctcgtttccggagacaaatgtcatctcgagagctgacaatcgtatttaccatgctctccaatgactttcggtccagtctttcaacatggtgagcattcgacaggtaacgcccgcctcgcatgggcttgccgctcactttcacccccctcctctcccttcaaaaaacgcgcccatgacagtcgacatcccctcttcgcaaatcaacatgctcgacgggacctcgccctcgctcacttcggaatgcaggtcgtacgaagagaagatccggcggtacggcggggtggagctcttcctcggcgggatcggggaggacggacatatcgcgttcaacgaaccggggagcagtctggcgagtaggacgagggtcaagacgttggccaaggggacgatcgatgcgaatgtcagtcctgggtccgggattcggggtgcaaagccgcagcagaggacacgtgaaggctgatctcgagcggctttggcggtgggcggtacagtcgaggttctttgataatgatccgaacaaggtcccaaggatggcactgaccgtcggagtggctactgtactcgaagctcgagagatcggtaagcgtctcacactcgatccaacattcgactctgagccgctgaccctcggactctccagtactgatcatcacgggtcaacggaaagctctggctctctccaaatgcatcgaggaaggagtcaaccacctctggaccgtctctgccattcagcttcacccgtgggcgttggtctgctgtgacagggacgcgacgatggagttgagggtcaagacggtcgagtatttccgatcgatcgagagcgctcaggacgaggtcgaggctatgcaggcgagggcgagcaagatgaacgggcatcaggggggaaatgggcaagaggatgtgcctatggaggtagggaggaatggggcggtgaatgggcatccgagatgagcccctgcaggtttggcctgccaggttgtacgatgatcgattttttcttggcgatgcggctctagagcacccgtctcttgtattttaacacaccgaaatcatatcgacgaccacccagggctgtccttaatcgactctgacctgcgacccttgattctgatgtcgatgccggtcgagatggcgactgccagggttgtttggtgtagcacgacatgtttcgatatttgccaagctaaaactcggcggccggctggaggagatcggggacctacgcagacaaaaaccaaaacgagatcgaggcgacacccacatactcgactgctgctatactacttctgcacagcctgatagatgcaagataaaccatgcgaatgattcggaggatcatgctcatagactcgagtgtacattaccacctctacgcccacgaccatccccccagagccgccacaccgactttcatcgaatggccatcaatgtcgttcgtggggtcaacctcggaggctggcttttgaccgaacaatggcgagtcgcctcggccatccccccatcccatacctcttcgccacaacatgcctcccacttataggcactaacttggtccccctgtactcgttgtggatacaggatcacaccctcgttgtattctcgaagtgccaacgacgaatggagcttgtgcaacgctctagggaagaacagatgccgatcgactttggaagaccattggaagtgagtcgacaacgatggtccggtgggagtgtcgaaagccggaagagtctagagatactgatgcccgacgactccttggtcatcgttacaaggtctttcatcaccaaggatgattttgaggagatgatctcctttggccttaactctgtgcggatacccataggtccgtcccgcaaccagttccggccatagattcttgctatcaatttactgatcgcaacatcgattgacaggttactgggcagtggatcttctagactatgaaccttatgtgtctggccaagtaagtccattcctctacgaacacgtccggccacccgccagtcaattgacgccccctccccctgcgaacgtgcatagtacccctacttaatccaatcaattcactgggcccaggaactaggcatgaccgtcctcatcgacctgcatggcgctcccgggtcacagaacggacaggatcattcagggctcatcggaccgatcctcttcccggcgaacatgacgaacactgagaggtcgctaggcgtcttgaggaacctaacagaagagttctcaaagaccgagtatggcggcgtcgtcacctgtgagtacataatcatgcgtcccgtacaggtcagacggccaatcctgatcgagaatcaacgtctacgtgggaatgcatcagcgatcgagctcttgaacgaacctaggatcggacaggcggatttcgagatggacgatctcaaggcgttctatacggccggaagtgaagccgtccggacgactgatcaggggatgggcgtgatggtgcacggtgcgtcttgctgctttccacatgatgcgactgagattctgctggactgacactgtgatcccttgttaccacctcgtagacgccttttggggaccgaggtactgggctgggtacgacccgtcgtcttcgaacatcatgggatcatcgcccgactacctcgagatcgatacgcatcagtactacgcttttgcacccctcgtcgatctaccccatgcgaccatcttggaatccgtatgcaatgtctcccggatgctcaaatctaccgatcgcagaagggtaccttcgactatcgtcggagagtggagtttacagacaggtaagccttggacaagtaacagtgggcgtgggtttgcctacatccaacattgacgagttggtggatctgtgacaggtcgaggcccggacgatccaaaatcaaatcgcggacaacctgatcgagcacgtcggacgtggttcaggttgttgttcgaatctcaactcgccgcctactcgcccagtggcgagggacaggcatcgctcggatggtactactggacgtgtaagtcggtcgggttcggttgttctgccctgctcgcatcggctcaaactcatttgccctgcatgtaccaccacagggaagacggaatgggagatcgacacctggtcgtaccgccggggagtccaggacggatatatcccatcagacgtcagcaacgcctccaccctggctttccctacactgggcaacgggtgtgtcgactcgtctttcaactataccgcacctagtagggctggggcagcagcgggaggaagggcgacgatgttgggttcggctcggcaagtcgtggtaataggcttgacttttataattttcggattcgtcacgttgtagcaagtacggtcttgacgcaggctgctcaatgcgtatcaatagaatatagaaagcggccaccgactatgaccacaagggcgaggcggctcagcgaagcgcgggtatgccgttcacagacctcaacaatttcgatcccactgatgccgaagtcacggcatcgaggctccatggtctcgagcagtggccaagccagtatgaccatatcgaacggcatgagatccccccacacagagttccaggtacaaactcggactatgatgacgtctagcggtactgcctcgcacaacacgccggtgaatgcgcttacccttgcgttgttcaagagtaagttcaatgggcttccggttcagcgtcaagcggtgtttcctcttggtacgtgcaccagggcgagcgattatccgggcctggtctatcagttttccagtgtacaaaggtgcgaagagtccgcgattgcccctatcagtagatagaagcgccattactgacgttttcgatttgcgtttctctgtagcaagactcactcaagcagacttccgcttctcgtgcatgatcgtaattcatagcttaccagattatgagagtgaaaacggccagtctggatccaaaattgacatctgtcacgaccgtctttacgcgtttgggtgtcccaagtcgggagggtataggttgattctgagaaaatggtcgttttggttcatgttctcggcggaattatatgggaattcagcggttgaaagcgcccggacgaccattgtgcgattccgcttgtatatggaacgaccggaaatggtttgcgttacgtagagtccggagacacgtttggggacagtgaaagtcctttcaatcttgatcgaccttaaaaatcgttgtccaggtcactgtccgttgtcgagtcgacctgcatcatgttcgagatcgtgctcgtctgcgtcaactgtgcgggagcataatcgacatctacgccgagagctgcaatatcgacaccgcgctacgggagacgcgaacggtggctttcagctgtcgctccttgcatctcggcttgcgcagaaactcacctttaccagctcgttttgcaatacgactctgcattccctctccctcttggattcttccgtaagcatcctcacctgatccctaagctgatcgaccaccgcccaggcggattccaactctgctttgcgtttctccctcaacgtcctcgcgctctttcggttgatctcgcgcctcctcgccttttttgcagcgacgccttctggatcgcgttgatctccatccgcacctggagaatccgggtcgggagaagcgacagatgagaagggtttcctaccctgcccacgatccccaggcggacggactgctggtttggaaagcgagccattagcagtagtgacgacggtaagaccagcactcgtcgaggcgcttgcagtcgaactcgaggcgtcggcccgcttagctcgtttggccggtcgagcggtagtttcagctggcggtgtatggaaggacgcctcgacgggtctcctctcgcgggtagacgatcgtgtgctcctcatcggtccactagcggaaggttgacgaccttgttccctctgttcgatcaagcccgcgaccccttcgtcctcttcatcatcgatgacgataatctcgataggtctggcatgcgtagcaccaaccgacatgggggcaggatcgatcgaaccgtttctacgagtagctggttgggcaagtgcaaggacaggcgatccgtcctcttcggaatcatactctggttcagaggaagcgggcatgcctggcaacgagaacccggtgaggccttgaataagatgagtcgtcgcgatcccgtgcgatccgtccgacgctgaagccgagaccggggtcgaatgggacgtgcccgtcgtaccggagaatgaagtgtccacagtggtcgatgtggccgaatttgtggaagccgatagcggaccttgatcgtacctcgggacattgtcaaacagctgccaatacgcgttcgaaccgatcctcgcacccagggtggaccttgtagacgaatcgaaagcggagagcggttggggtcgatgcctcggggagggaaatgttggcggtgggaacagcatcgtcatcgagccttcgtgcattgtaggcacctcttcgtgtggagaaaagttttcccaatcgaccggttcccagatcctgctactcccgccaccgatcaacagactcggctgagttgtcaactgagacgagctttgttcttgattttgatgctgtgattgcgcatgttgtcgttgaaaatcgctgggaacgatcgtttcttgagaatcgaaatccctcttgctcagtccgttggtggcacccatgtcgttttctgaagaccgagtcaaggttcgggagcacggtctacctttaagtcctcttgctgggccggtgtacggctgatcattaccctcatcatcccctcgcaaatccgagcgcctgacaagagagcacggtgttggagagagtaacgcggctggcttgtccgtcgatccaaagatatcgtcttccgtcctccccacacctctcccatgtccgagcgccaaaagcccaggatccatcgtctgcgaatctccgagctccgtatccattctgaccgcggacgtatgaatactagtagatcccgaaacagatactgacggaccctcgaccatatccggcgagcggaagaacgatctccatcctgaacctcgaggtgaggctctcgaggcgtacctggccggtgagtatggttgttgtagttgttgctcttcaaacgattcgatatgagtcggagtgatagtttccaacttgacgtcggtatgatccttaaaaggacttccattcagggtcggcgccggggacgccgtgaaacgggatttgtggtggattaaagatgacggactcgtcctccgcgatgaggaattcttgttgattatcccttcgggagacaagtttccggcagaatgcgacatgatcttgtagcttctatcttgtaagagtgatagagtgtgattagtatggaggtcttcaaatgacgaggtcgtgggtaatccaagggtggaaaaaagttgccggctcgtttcgctatgaatcggtctgtttactttttgtgatggcggtgatggcttagtactgtcgtgcagctcgaaagggtagagttgagggtcggagggttgcaaagagacatagagcaggacatagtatcagtagctaggtgtcaaaagtggggatctttgaaatgcatgtgcgactttgatcagacgactcacgagaaagatgaagtcgatccgggcgaagagtttaggccacgatccccgtcggcgctgtcaggcatgacgagcggtgcaagctagtaaggtgattgagagaggtatcgcagagatgaacagtcagtagaggtactacctgtatgatatatgaagagcggctagtctatcgaagagttgccagggtagacgtctgtagtaattgagctcttttatatactttcaacgaccaactgacgtttgatctcgacccccggaagcaaatttaggaacaatagcgaaagggtgattcagctatccggaagtaaattcaggatcttcggatgtaaattttcacgtcttcggatgtaaaatgatgacgaatctgattatcaaccccttcggatgagacaaacaacgacaatgacgaggttgacggttctataaatctacacgtcgttaacacagtctagacccgcttcactcgtttcttgtactgcgccaactctctcaacgcctgctcctcgtcctcgtccccttcctcttcgacccgcttcctctcccgctcggcctcgtccttttcaaacgtctgcatccgtccagaatcgaccatgtcccgcatgggatgagcatccccgctgatcatcgacatggcaggattacgttccatacgctggaacagggtcatcagacgttcggcttcgacctctttttcctcttgcgtcatgtccgccgtggatgttgtccccgtggtggacgccttgccgacggcggtcgtcggcgaaacggccgtgaccgacacggaagccggcgtcgttgccgtcgtggccacgcctttcccgattgactctaccacaccgcccatcccgccgtcatcgacctgctcgagccccgtaatcggatgtcgtaatcggccccccaaatcggacccttccttgacctcttgaacgctcgcactaggcgggcccgaaacgcccttggtgaacaacaatccagccgcattcccatacccaatctcgcgcacgacctcgttcgctggaatcagcatacaaaaccagacgaaaatacgatcagctcgcatttgattaccgatcgacgacgacggcgtaacctaccgttcgccccgcatgccgaccaaaagacctcgccgatcgccgtcgacaagtttggatgactcggcgatttcgagaaccggatcagatggcccaagagcgtcggtcgggattcgagtggtttcgaacccggtgatcggtcactgcgatcgaggaacaccgtagagagagacagagcatgctcagtatctttcatctgcaagtcgacctcgatcctccctgcaccacatgacttgtactcacaggtcgtcggggaacaacaactctctcacttccctcggatgtccttcggcgatctttgccaacaccaacacgctcggcgtgacgacctcttcggccttgtccacctctttccccctctcgcccgtcgggatcggatcgcccggatcccaagggccgattcggtggagaaagtgggtctccaggataggatacagtttaggaaggatcgatagggatagatgggggaatcgggtgagacagttgatgcagtgcgtcagcggaggcaagagttgtgaagaggggatcgaaatgaagaggtttgtgatgggttcgagaaggctgtcgagcgtgtggatgagcgaccggtccgaggcggaggcgacctgccgtcgagagaccaccgagactcacccgccgaatagactctcccattgtgattccgaaacgacggggtagagggcaaacacgtgatacgccgtcttgagcaactcttcggtcgccattttccggttcgatgaataaggccttgccagttcctgcaatcggccaacacgtcagtctcccctcaccatatcccgcatacgatctccgcgacgcaccgtcttgatggcctgtacaagcccttgctcatcgaccaagttttccaagaaacccgattctcgagatgcggtcatccacatcaatatccgtccatacagaaagacgagcgtatcgtccacatttcccgcctgcgcctgttccgtacgtaattgacgtacgaccgcccgtccagcatccagcgtcgatagtgatgagagcgtcgtcgacgaatgcaggaacaatgtattggcgatcgtcgacaaggcttcctttcgcactttcagggggatatcctctaaccgaggtggtgatgatgaacccgtctctagtgggacatcggcgtgccgtaacagtgttcggagcgcgtcgacggttgtcagttccgtcttgcccgacgtcgatcgcgacaatgtcttgatcgtctccatcgccgtgccccatgctgatcccgaggacaccaacattgtcaggtcctcccttcattcgctactttatcggaactttcttggcttactgtcgtgtgaccatgtggaagagaacgctcgctcgtcttcgtctgcttgactaaggtctgccaacaacgactttaacaagctttccctgcgtgtcgacgatatgctacctggttcggctagatgatccacggcgagcgaggtcagcattctgatgatccctttcttcggcagcaagtaggcattcgcttacctttcaagacgtctttcaagacccctaggacctcttgctcggtcgaacccgtctgacctggcctgactctgaccttgtcctcttccttgccgacgtcggcgtcgacgtccatctcctcgtcttccacgtccgcgccctttttgttgttgctgtgactatcccccgaatgactcttcctcggcttgatcttggacggtccttcgagcgggaagacggtgaacgggctcttttccggtggactcgactggacgaaccctccgtgacttcggatcagggacgaatagtactgttggatcaactcggccggtacctgtatttcgtcatcagggaaactcgatcaccttgtcagctcctcaagtcgtcccctcgttcatcgcagagatcgcccacgttcgtcagactcacacagaggtcccaatccgtcaccctgagaaactccctctcgagcgcgttcaactcgcccacccggatcccaccaaccttggcataatgcacgttggtgcaaaagacgtcgcacagcgctttcgaaccggcggttatccccgagatgacgaaccggtggacggtcaacgaagagagggtaaaggtgggcaggttggtgcatgtgatatcgatgtacgccaagagggagaggagcggaagtttctggtttaggtgaggttgggcgggagggctgagtatggccggtcgcacgggggacatctggacaggaaggctcacctcgaggtttgtgtatttgactatacgtttgaggtagtcgagaacgctgatccccggtggtgctctcgagtggaatcgggtcaacgatgacggggtcaagacgacctgatcgttgtgttccagtaatttgttaagcatgtgcgctgagcatgccaggttgttcagaagaaggaggttcaatcagttcagtcaatgccatgaaatccgaagctgacaagtgtagcgagcggatcaaccagcaagcagacactcaccgacaagctcgataaggctatcgatctcgcaatcgataaatgcccagggtagagggacttttgatccttcggttccctcgtcccccgcttcatccttcatctcgatgtcgacctcttgccccgtcccggctgttcctatcgcggctgtatcgtcctgtttagtagcggtcgagatcgattgagcgacaccttgaggtagattgtcatcgtcgtcgtcattccgacgttcgtcgggttcgttattctgcattattattgtcagatccgttcaagcagttacggacgggcgtcgtcgtccggtttcgagaggtggaatgacaagcgaattatcaagtcgtttgggatctcctttgtgtcgaattcatgcaagtggatgtgcagagagagaagagatggccatcttccgacgccgagagatagaggataaggcggactgggtctggaaaaggaaggtaaaagacgatgggacgacgcctgccgaggtgatatgcttgtttgtgtgaaatgtcgaggtaccgcgagttggaaagcgtctctaaacgtgccttttttcgaaatgagaaagaacccgactgactacaacaggttcggacgacaagtgtatctatatggtctcgggctgagaggcaacgagactgctgggttgaccattgacattgagcatgacaacaagaagatgataactcgctgcctgcctggagttgagtgtcgggtcgtcttggtgcgagtgggaatttgattccgcacacgttcgcaacatgttatcatattgttgtactcgtactcgtccatgtccacatctgatacacgttgaacatgggaatagacaggcaattattatggataacaagcattactgagagcgagcgagaaaagagacaaaccacacacccacacacacaaacgcacacaaacaactggacccggtgggtatcacacatctacctttttccacctcgaccgacctcacctaccctcacgctccctctgctcgatccatcccttcaggctgaccaacaaccgcctcgtctcgtcctcgtgtcccaacctcacatcgttgatactcacaccaacagtatccacgccctcgtcgatgcacttgtccatcatcgtgaacaagccctccaagttgggctcaccgggggcgacgggggtgaaaatgctctcctctgccgggatggccgaagaggattccgggtgacaatacgtctcgatcaatcgggtgacaagtttcccatcagcaaacgaggtcgagagcgagttggctcgttcgggaagatcaaagggcaggcgggcgttgtaccagtcgagcagaccggcagagtcgcccgctaccgccaccggagccgaggccgagggagccacgataggaggctggatagggaccgccgtaggcttcgagtttacctcggaaggctagtgtcattcgggtccatccgacgtcagcgaacgctctcgttcgttcgaatccgggttggtcaggcttaccctcgtattcgtgctcggtcggccctcgctagggcgacgcatatctcggctcggtcgacccggaggagccatattgggtcccaaagtgctacgtcgtcctgcattaggagagccttccaaagacatctgcaaccccgcccccataagaaaatgcgcgtcagtcaagactcgtcgcgtcgagctgggctctcgacgcccctgatcgtatcgtcactcaccagcacgctagcgtccctaggagtcagcttgttcgggtcgtcccgtcgagcggcacgttgagcggcctccctctggccgggagaaggcggtcggggcgccaacatctgggcttcccggagggggatcgtcgggatgttacaggacgaaacgacgggggctgtagcgtatgacgaatattcgatcagaccgacggttcggttatgacaacgacaacgacctaccgctatagtcccggctgatggtcgccttcatcaaattcttcatccattccttgatgaccctatgctcgttgctcgcgaaaaagtgcgtcttttctcggtcatgcacgagctggaacccaaacccagttccagcgttagggtcagacaagaccttgtacccggccaggtcgatgtgtcccttgaccttgtcctcctgcgggctcttcatgtagtacaggtgcgcgcctttgagcacaaagtatcggctcttccaggtgttgtatcgttcgccctttttcttcatgtacccagcgaaatcgggcttgccgatcttggacatggccgagctctcgttgggagcgacggcaccgctcgaggctcgcatgccgggatcaggcgaaccgctcgccgtggcgggtgcaggcgtacccatcgagactcgctggttcccatggatcggcgcggtggcgggaccgatggaagacttggtgatcctgttcgtggcgccaccccctccgaccaatcgacttaggctcttttgacgatcaggaccagtcggcgaggtgttcggatcttctcgcgtgaaagtcgccgtcgaagcgttactacaaggctgatggtgatgagcgttcggtaatcaacgacgacatggatgatcagatcgactcacgagggatacctgggagcgggttttcggttcctgccgatggtgcctccaaagaagctcatcctctcgctagaaggcctgacgccgtcgagactgctcttggcctttttgtgaccaaacagggcacgctgctcggtcgagttgcgcttcgtgttgggcgtctgcggggacgaagggatgctcgatgcgatactgcggatcgaacccgttcggtgatgcgtgtcggcgggaggtagcatgcccgaagtcggggcgtcgggagtgatgctctgatggacggaaggtggtcgattatcccgcttgcgcgactcgtcctcttcacgaatgggcgcattgacgagactggtggaaatgctggacttgcgcgagtgtgcccactcgccatagttgcccgatgctggagtcccgctaccgctcctcgaggtctgaggttgagattggggacgaaccccggtcgtaaacagatcgcccgactcttgcatccgagcagactcggcatccatcggctggtcttcgggaatggtgtggtgtatacctccgatactggcgctgcgagaaccagcctcgttgccataggtgggcgacgttgggtatcctccagcgagaactgtgggcgacgctccggcactgcccaggcctcccatctgggtcatcgagggaccccgtgcgagccccgaagacgagcggttcgaggcgttgcccatggacattgtcgactggggtcgtttcaggtcagcgatagcgttggcgatcttgattcgctttccaaactgagggatctccaactctttgagcaggttggcatcgagctccaggaggacgtctccagtgatttcgtgttctaccggaagacgatcgagctttagcgacatcacagacgtggcgatcgaacggcctttgacgactcaccggcaaacttttcgcaaatggcgtcgtcaaagccacgcgatcgagcccattcgacgacctcggtgacgccccattcgtgagggttacctacagagaatccagaacccgcttcggacaatctcgacgtgtctttgggcgtcacggctcccgatcgcggcgcggccagctcttccgaatacttgcggttcagcatcggtggttgttgctgaggtacaggcgaggcgctcttggtagccgcggctactgcaggcatctcgcggctcaggttggacaacccggaactctggcgacggaatacgggcgctggaggggactggaagcggtcgtcattgagctgaaccaccggggtacccataggagactcctctcgagggtcgacggcgggctgtacgaaagctcgcggtgtgttctcgatgggagcttgcagggtggtcggctcggtgggcgccgactcgacacgctcgatcgctcgagtattgactggacgaacggccacgggtgcgacgatcgccgcaggaggctccaacccattgccgctctcagagaccggctcgaccttgttcttttcctgaatctgctccagtcgacctccctgttcgcccatcttgccagctccaaaggctccgaacctggcgaaccctccgaaccctttggtcgcctgctcgtcctcgtcctcccatccgagtctcctattggtccctctctttgggctgccgagaccaccgacgacgctcccttcgtcttccgagtcgctctcgtccgagtagactagcccgtgaggtactccaccggacatcctgaccccggaaacgcgttgaccgccgttggactgtttcctggggaggtccacgggcgtggattcggtcacgttcttgacggcggacggaccgggggaagcgaacccgatcgatgcgtcactcgccgcgcgtttcctcgcctcggcctccctctccgcttcgacctcgtcggcgagtttcttctcctttttctcattctccaacctggcctgctcggccaacctggcccggatgttgttgttatcggctgcgacgtcggagccaccggcgggttcatgttcgtccatctccaacgtgtcatccccgtgtcccacgctcgagacctcgcggtccagctcgtccttttccgtgatcgtccgatccccatcctcgggcataggggtagcgtccctatccttccttctctcctggtcctggtcttggttctgatcctgcttggtggacgagacgatagccaagccggcgaccccacctaccaatcccgtcaccccggctgtggcggcagcgatcgtccccgctccaacgctcgaggggccggccgactcgtcggccatgtccatcctcaccgctgccctctctgccggactgaccagctcgctcgcctgagcatgtggcccttggatctgacccttgctcgcctgttccctcgtctctaccaacccgtcatccttatccccctccacgccatcatcccgtggggcattgtccacggcggggggtgggatctggatcgcaccggaatccgcactctggagagagtcgctcgatcgagccctgttgagcgatttcacaggtgaacccggtcgaggtgttccctctgccccggacgtggctacccctccgatccctaggcccataggcacggaagagtcggagtggacgacgttgctcggagtaccggctttcgaccccggtccgatgttcaacggttgaggagcttgttgcatctccaggtaaggcttgggatctgctcccgtgggcaacacgtagctcgcaggaaagagtccttcttcccccttttggttcttgccgcggtaccacccatcgttgtattcctggtccttttccacgatcctgatgagctcgttggcggggaaagagagctcgtcctcgttctcggcggtaaaggcgaaaagggaaagcgtggtctctatcccggtgacaggatcgataccgatctgagccaagagcggggaaagtgacgtctggatcggtttcgccgtgaggtccgacggggtcgaggcagaggcagagggatcgacgtccatgctcttccgggaggactcgttgtcaccgaccgcctggtttccgtcatctatgacaggtgggatcatgatctggtcggacattcttgcccggatgggatggcggagaacgaatgagtgtgatgcgagtggcgagtggtcgatctgtttagatctagctgtcgtcgtcgtcgtcgtcggggttccaagacacgttcgcgtggaaacgacgtggacgatcctcgttcctgcaatgtcagtagacgtagtagtagtggtatagtctgccttggtccgacctttgatatcgagaggtagaggcagaggcgggtcctcttttatatactcgtcgtcgtcgagtgctgtgatcgcaagactttactactatataatcgatgttgacatggtgcatggtgatggatggatggatggatgataacagaacggggatgaagcgacgtctgtctgtcagccatcctagcgagacgagagaggcccggctggactggactcacgcgacgagcgacgacaatgacacgacgaagagaagggggcaggcaggcagggaggcttgaattgcaagaagttgagatgtggatgtgtgggatattatatgtttgtacaagccaggttgcgagttgaataggtcgcaagaatacagaatacgctggtgggggggagttgctggttgacctgttgacctgctgctggtgcgtgagttgagttcccgcgcgcgcgttctgggatgattcgcctccgagaaacagcagagcaggtcgcttgccccaaacatgtcgccatttgcgtagacaaccaatcccctgaccctcaaacgactaccaggcgagtctggaccgcctctagcatagtgtctagtatgtagacgcaaatcttgctacaaaagtccacgttggaggcgaagcggttgaaccggcgacggcctggctggacaagaacagctggggcgagcaaaaaaatgcagtccatccgcgaacaaaaagtgatactcccgctgaggcttgaactcaggaccttatgcgctttacaagttaaggcttgttaagcatacgcgctaccaactgcgccacaagagcagatatgtttggcaaacaattcaaactctacaattgtatatggctcagctgatgcacaagcctcattcttgttttcgtccagtcacattccgcgcctgaatcgactccccgtccaacaataagttaagaaactcgattgctaatgccgtgaaattacgattcaaatattcctctgtaagagtggcaacacataccttgtaaactcgtatatcgtcccttgccatcgcaagtatgctggtgccttgtggcctatcgatactctcatcacctcagcctataggaccagctcgtgcttgatggcaacctcacacgactaggtcttgaacaggatacaacaccatgacagctcttatacaaactggtcgaccatcggcggtgtccaaggcaattagattccctttggcggccaacgctcgtctgcgatccagtccacctcgaacgtgtgaatcccacttcccacggtcctcgaaactccgggtagacggatctcggcagaggcgttcggaggaacgcgagctgtcaggttgagctcatctccctggatgctccatgccgatccatacagaccataagggctcatatgggacgtcctggcgtgggtgatcgtccccccaggttgaggggcgatcagcgcgcgtttccatccagcctcgagagaagatagacccccgacgacggtatgaagaaagttggcaacgctacccaaagcgtagtggttgaacgaagtcatctggccagggttgatacccccgtcagggagcatcgaatcccatcgttcccatatcgtcatggcgcccatacagacggggtacaaccagctcggattcgctttttcttgaagcatgcgatatgcaaagtgtagcatatcgttctctgccagagtatccaggatgatcggggttcctgcgaacccagtggccacgcggaatacatctttgcaaagatgccgctccaggcgcttcttcagggcggcgatgtgctcgtgatcgtcgacgagatggaacctgacggccagaacgatggcgcatggcgaatcgctcaagaggcgaccgttccgcgatagttattccctttgaaacgcttccttcaaccgcttatggtccgccagatagcgatccacctcggcactcgtaccggccacgcgagtgacctccgccatggcttccgtcaccctgaccaggtaagcatcggccacgagatgcgtatcggtatctcccatggctggcgagtgaggtgatgctttagggtcgagccaatcccctagctgaggcaaatctcgatcccacagacccgtcttctcgtcacgcacgataccccgctccaaccacaccttcatgctttcaagagagtcatgcaggatcgaggggtctccgtacgcgcggtacaggtccagcggtgtcaggatcgaaacgtcagcccagatggcgaatggaaggggcgccccgggtaagatgttggggaccacccaggggacgactcgagcgtggtccttgagctgttcggcgcgaacgtccttgagccaaccttgcagaataccagcgacatcatacatataggtggccgtaggggtgaacacctgaatatctccggtccaaccgagtcttcacgcgagaccggccgagattcagctaccgtccatcatggaaaaactcgagatgctcacctttcgtcccgctggggacaatccgacggaatcgacacaaagttccccttcatgctccaattcacattagagtagagttgctcgatcatagggtgcgagcatgaaaagtcacccaaacgctccatatcggtgtgaatgacgacccccgtgagacaatcgagatccaggcccggccagccatctacctgcacgtagcggaagccttgaaaggtgaagcggggctcgtgtccgatcaggtcgcccccaagaataatcccgtcctgagccttggcttctcgaaggggtcgagtgcccaattcaccgtgctcgagtacctctgcgtgggtcaacacgatttctgagccgtccgcgccacacggctgcctgttcaagcgcatccagccgaccatgttttgcccaagatcgagtatgaacttgccagagggcgtcttgatcaagctcttgggcgagatttcctgaactcgacgtaccggcgccgattccgtgctgataaattcggctgacggtctttcgaggatctccattggcgtccatacctcctcgacgcaccgagagtcaaaggtctctccgtcatacagctcagaggcaaggatctggccaaaggaccattgccaagacgaatcctacgctacgatcggatgaccgtcatctccctccaattgggccatcagggcattccgatcgccgtatatgttgcggtaaccaccccgccagccaagacgtccgctgtaccatcctgaaccgacgtaggacgaaaaaccgttctcccccgcctgaagcaggtcgctgacgtcgaaagtctgaaagttgagaggatgtcgatagctttgccatcccggcgcaagaacatggtcgcccacgcgtttgccattgattgttgcatcatacaacccgagcgacgtgatataaagtctcgctcgcgccggcttttgctctagttgaaaggtctttcggacctggaaaggctgtttactttcagtcgacgattgcttctcagcggttatgggaagcgcggtccaatcttcagacgagagcagcgtagtctctatatccagactggcccatccggttgacgatccgtcctggccggttgctctgaccgtaactttaaccgcttccctagctcttagaggcttatcgggccattccacgagcctggattgactcgacgtgacggtcgattgcaatttcctccatcgcgcttgatgacgatgtcataagatgcttgcacccagtcttcggtttgccccttgaatctccaagagattcgaggagcggcgtgtccaatggcgaaaccagactcgtaactctcaatcgagaccttgtcgatctcaacgccggttgtgtcggtcatgggatacgcggaagctaatatggttgaatattgagatcgagatagacacgaagtgctgcaagggttccaggcctattcgagcaacgaggtgtacgtgacgctgtatagcaagcttcagctttattttgagcatgttcgccgactcggacgaagtatcggcccgtcgaaactggaggtcggcttgagaatgaaccgagcaagtcggcgttgagttgtgggagcacgtgaaacggattgtctcgtgacaaaacgccaagcgttggtttcttcgatgcaggaatcggcgaatgatcgtggagcgacttgtggccgtaatcttccttgagtatgtcagctcaggataccaagtccgaagagcgcttcgccataattgacggaccatctcctaagtgctggtgcccgaatgcggagtaaatcttgtactgaggagcacactgcgccacgaattatgccagagctgatcctaatccttgtgcttgacgttcccgtcactaaatgtgaaggtacgatataaaaccgtagaggcgaggtggagctgagcccacgatagcttatcgatcatgtttcaggacaagcgacccgcttacagcttcaagatgccggtcaaagatacctcagccgactcccctcgtccgttcgtaggcgacctcgataacaaggacaaggtcgagcatgaagagaatggatttcaagaggagcatgtcgcgctcaagtccgagtttgataactcgaccgcgtggcaagcgctcaaaaccttcagagtcgtcagcttgtattgtgtagctgccgcattctctgccgctacagacggttaccaaggaagtcgaatcttgttaaacaccgctgggatcgtggctcatccgggaggttgtagatcaacatcaacggcaacattttggccaataaaggctttatccgccaatttggcacgactaccgatgcgaccggcgctcaaattcttgatgccgcttggagtaagtcacaagcaagttccgcctgtgaccatacttactgaggtaccttgctatgtctatagtctcttcctggagcgcaatccagtctgttggccagatcatcgcgatgacaacgatgcattgtctcagcgatcgattcgggcggagagtcgcgatgtttactctttggtttcttctggccttggtcgaagagtcatactgccagacttccgtagctaaaactcgatcgccactttgaagtcggtcatgacggaatctctcgccactcagccttggcactggttgatcggtgcttctcgcaggagttggcgttggagctcttcaggtgaattccgccgaattcctcgcacgagggttgcactgactgtcagggtcgtttcaggccacggtaccggcgtacatcgccgagctcgcgcctacccggatccgaggagcactcctgctcgcctactccttctcttttggtctcggagggttcataggtcctgttgccctgcgcgaactcaatctgagacacccgtatgcttggcggatccccatcctgtcgcaatggggacagattgggttgatgctggtcatatatatcttccttccgggtaaggctgtttgcatgcattgtttacgcgatgtaacactcacccagacgaggccctctcgcagagtctccctggtattgtgcccgccggaacctcgatcagaaaggcaaagcgcttcttgccaggctctatgggaaggtccccggctacgacattgagtacgaatggcagctcatccacaacgtactggaccaggagaagagacaggccgagaacggtcacgttggcttctgggagattttcagaggcgctaatctggtgaggtctcgctttgatctacacgtactcgacttgtgagatctcgatcaagtgtcacgttgcgtcccgtctcgagctgatgggtccttctactcgatagacttcttccagtcggcagggcagaaagatccgttcttgacgaccttgattgtcaagtgagtcagcactgatgccatttcaagaatcatattgatcgctggtcttgcaaatagctcgatcaagctggtggtccttgtgggaggcgctctgctctcggacaaattcggtcgacgtgtaatcgttcttacggcctgtgttttgtgctgggtcggactcatggtcattgacggtcttggtctagtaccgcttaatgacaaggtcggcggagtgctcgtgaattatccccctctttgcaggcgtgacttgctagctgatcactcgattgcctcttcaccagatcttgttcgcctgtgtttggaacgctggttcaacttcgcttggtaggcaagatcgatctgatcagatatctctgagaggtggctcaacgttgctgcttttcaggtgcgcttggttggtcttacgtcggcgagacatccaacagtcgactccggtccaaaaccgcaggattcgctgccgcgatcagttgcctgttcggcatcgcctttggtgtaggcgttccttatatgctcaacaagaactataccaaccttggactcaaaaccgccttcttctttgccggcatttccgctccggtcatcatcgccgcgtggttcatgatcccagagaccagctgtaggtcgccggccgagctggatgagctgttcgagcgggggatccgtccatggagattcgccagtaccaaaacacaggtccaacttgatctggacaatcgagtgaaccgggcaggggcgtgagcgtcgatctcggccgctccgaacgaagaggaagcctcgcggagccaatgtaggtacaagtcaaacctgaacttgcttgatgtaattagtgtattgcaagaaatataaccttgtacgaatccgtcttccacaacgacgtttgttgtacagtccgcgattctttgctggaattgctacgaaccggatcccccgccctctctcccccgaccagcggaacggaaagagtgttcttcaaaagtggagtctctcgtatggatgttatccgcgaacagtagcatagtcgtaaaaagtgtcgttgcacattcccttgccaatccctctatcgtctcgcacctcgtcctcccctccttcgcccatccgtcaatggcgcgtccagccgttcattcacgcctggtcggcgtctatcctcgtccctccatctaccctgtgtttgcctagatcgatcgtcctggacatgttcgcgtcggggtgaacgggatcgaccacctcgaccacctccccaggatcctcctctattcctagtgtcgccgtgtccacccgcccgaccgtgatctcgtgggcccgccggcaagtcgcgtcgatctcgattcggggagcaaggtaagagttccttaggtgccggtcgaccgctggcgccgagaatgctgaaccctgccgtgccactcggtctcgagtcgttcacggtatgaacgtttgtgccacgggtatcctcgtcatctgagatgccatgggcgttcctccaattcgtcccggccgcgtttgacctaggaggagggactgctgccgatcgcgacgcaggatcggacctacgagtcggttctggagcccgtcttcgtggtggagaccggctaggtctcgaacggtcgcgtttgcccgacctggacctggatccagccgtatatccccgattccgcggagggggtgtcctatctcttgatctcgatctcgaccgcgaccgcgaagctgatcttccaccatcagacctatccctccttgatctggagcgagaaatggacggcgttctacttcgagatctcgagtcggaccgggacattgatcgatctcgcgattccgagcgggacctcgaccgtgatctcgactttgatctttccttctgaacatgctcgagctcatcctccaactccttgactcgggattgtagagatacgatctcccgcgactgctcttccagatcatcgctgtacaaaaaggaatattgtcagactcccttcttccgcagagacaagcctgaagaggtcgactcactctagcgaagaaatcatcattctcgattctttagacaaagacccccgggttcctttcagctctccttccgacccgatggcgtctgacgtagacaagagactcacctcgcatgacttcagcccaccccccggcatcctccgactgatgtacctctccaaccaacaatcccgccaattctgtattctcggcgaatagacttttcaccctctgcaagaccgcctgaaggtctaccttggaggtcgacgacttggcacctgagccttgtggaagaaaggtgagatccggtttggcctcgcgggtctcctcctcattgatcgccggtgtagtagtggagggggaagcggtcgcattggaggatgaggtcgactccccgagaaaggtgtatcgaagggcatggttctctcgtctaaggtcgaagatttccacttcgagttgagctgtactgcgaggaggaggcgggatggaagaggatgaagcgtcggcgggttccgctttgagcgtgtcaggcaggtgcttcggcaagagggaaagaaggtgggtgttttgacgctgaaagtcgagctcaaagtcaataatggtcgtattttctcgaagatatatgagcagcgatcatcgactgacgctgaggatcgagttggtcttttctatccgttcgagcttggtctgcagctgcatgcgttgggtgatgaggtccattcgttcctgttcaggagcgtcaaggtgtgcaagaccttagtgaacccgatagacttggtcgcgattctcacgaacgtacccgttgtgctttgaccctcgctgagcggaaagatgagaatcagtggaccgagcaacgtaaaagatgcggtcgaccaactaacccttgttactgcttagagatgcgccgacatgctcggtgtccgccaatgtcaagtcctcgtcctcatcccggtaatctacctcggtattgacgacaaccgcatccttgtcgttctccccaggaggcagcggcatcgtacaagacgaagctatttgagagtctgacgcaacttgctgttcgaagaagctatgaaccggaccgggaagacgtttgtcttgtgatggcttagttcgagtcgacaggcatgtcgcgaggtctttgatttcgccagtcgaggagctccgatagcgtaccccttgattctcctgacttgatacgagcaggatatgtcgtcgagtagcgagtagtagcaagttaggcgatccaaaccagactatagtgaagacgagtagtagttggtttacaagagatgacatgatcgactttgctgcttcttctgcctttgaccccgcgtgctaggaggaggtgacatatagaaattgtgaaatctcaactcatcgacccacaactctacatcttggttggcattcaaactccctccttgatccccatctagactgctagctatagcgctatagcacatactgtgacctgttgaacagtattgctgagactccgccataatgtccaaagaaacaacgtcgaccgcgccctcgcaacatcccgatcatgaaggatcatggatgccgaaatctgtcctccgattctactctaaatttcccctcgtactccttcccgccgaaacgtcgacgatcgtggaaaagatcactgaaccgacattatgggtgagctttgcgctctcttccaacacccaccatcgcgtcgacgaggcacaggactgatagctctcttcggccggggcggttcctcataggtgaaaccgacctatgacgaagacgcttatggttgggcatcaagcgacccgagctgtcttcgagtacaactcttgttcctgctccgaaatgccaaggtccagttcaaggcatgggataacatcgaagctgctccggaaggcgagttcacggcggacgtcacgtcaccagttccggctcgatcggtcgtgctaatccagaacgttcatcccgcatggaaatcgctacacaggcactctgccggcactacagcttccctctggagaattactggcggcgagcgagatcagagcttggttggaaaaggaacaccctcttcccgaagaatctcgagcgtaagctactctttgtcaacgtagatcgacgagtaggcagctgattccttactgcactcgtcgacgtcgatgatatgaggatagcttgaacggtatgccctcgcaagaagcgcatacgacggctctggcacactcgcacctgatcttgtccaagatcttccctgcctacgtgagttcaatgtctcccccttcttttttctgccaagaccgcaagcttgctgaccgtcaccatcgtgttcccccgggcgatcccgtcgaccccgctcaaacagtcaacattacaacccctcccgacaaccctccagctacccttcccgctaccgaccacaccgatccccctctcagggacggtctaccacgctctacccctctggctacgtgatctcgcaggagcggaatctcggcagaacgaagagctcgaggtgaaggagcgggaaggaatcgagggggtcatggcactcgccgggttggtcagggaacacgttagggaggggaacggatggttcttgggtgcaaggtgagtgggcatagacgtcgacctcgaccatgtttcaacgggagacgaacgttagatggctgacccgacgttcgcttcgcctcgcctcacctcgtcttgggtggtcatagcgaaccatcacccctcgacgctctgatagcctcccacatctaccctttgacgaccctccccgagactttcaagctgagacagaccgtggataccgagctcgagctaaaggtatacgtagagagagtgatggagttggctgggaacaaggtgcgggggcatgtcaggcggtagcggtcaaggtacttccagatcgacacatgtgacgatgatggaatgtcagagaaaggtcggttgtatccttgtcgagatgtccgtgccggaatcgagcacggtggccatttcgtcgggcggtgagagctacacggaatgagaaaagtcagaaattgtcaaggaggtcgaagaagtggcaactgaatatttgtagaatcttttttttttaatgtcaatctaaacatatctgctcttgtggcgcagttggtagcgcgtatgcttaacaagccttaacttgtaaagcgcataaggtcctgagttcaagcctcagcgggagtatcactttttgctcgattaacgcgattttttgctcaatgtgaattccttgcgacatgccttgtctttttgcccacgccgttcgtcttgccctggggtctgctgagctgttctggtgaccaacacacgccgttgatcccctgtgtcggaagccttcctgctctttctccgctttcggttggaggagacttttcaacatctgaaactcaggcttaaaacgcttgaaacgcgctgccggctgaggtgacgacttgtgacgatagaactcgtgccctggttgtttccatgtaacgtccagcttgctctggtctgacttctcttgttggacacgttactcccctgcttcgacgggatgctgcaatcctcagaaggatgtctacccaaagtcaccaacgtaatggcccgtcccgctacttcacaaaccatcgacaatatccttttctcaactatctggtggaggacaagccaagatcaagaatcgtttcaatccgatgaatgctgcgatttggccctcaggaaatcgaccctgtgcgagagaaccggcctagactttaccgacaacggcgtctcttgccggttggccgtctattcgagcctgatctctcacttaagccatcgcgctacgcctggcatccgacacgtccgcacagggacgccctgttgccatacggatccgacaactcgaccatagggcccaactatgcggaatcactctactgatcgcctcctgggccgaggtcacgggtatagatgatcgtgggcgacaatgacgatgagcgcgattacaacaggagatcgtagaagagacattccaagccaatagtcgtgataaaaaacgtgttccagagtcggtgactggcgatattcgcgacgcgacggggcacctagaacgaggtcgtgttatcgacctcgatggtagggacgatactggcgataaactttaaaaactgcacgcggcatgacattatccatttcagcatcgatggggtcttctcacggatactgtggtgactcacgatgaccatgtaaaagtcaacttgaacgccctgaacttcttcaggcttgttgttggcctggcttgtcgacgccgcaccagcggtagaggagctcgatccaccggtgacctttctgaccacgccgcctagaccccagcctttcttcttcttgtccgacttgtccgccgccgagcccgtctcctccttgctcgatccaccggcgacgtcgtccgtaatctttctggcatcgtccatcctgtcgataaacttcttcatcacgctcgcatgtttgcaagggtgaacgctggcgagcagctgtcccgaatgagggaacgtctccatcgtcattgtcttgaacgcgtggtccgaggggacgtcctggaagacctgtgtgggcgtcaagggttgtttgttctagcgaccggcgggagtggatggtcaaatcagcctcttctcgacatcaacggaccgagtccgccgacccacctcgtcgtaacccaacagccaaaaccgaggggtctgataatgcttgtcgtagctgatgaaacagtcatacgtcctgacctgcaacaagttttccctcgtcctcgactgctccacatctcgactacaggttgcgtacggttccgggggggcaggtcgcgaatcagcgttgttcgtgagctttgagccatccatcccgaatcgacgctgactcacacgctaggatggttcaatacgggtcgcttggccgccgcctcgtcctcttcctcgagcatgaccccttctccctccaactcgtcgtccatgtccgggatatcatccatatcagggatgacgtctcgttcgagatcgagcttgttcaggatatcggcggtgagatcaccgagatgaggttcagcaggatgagcttgcaaggtgggcacggggagatggtcgatagcgtccgtctgatcgtcgtcatcatccatgtccgggatctcggcgagagccgccgccgacttggtctgatgagaagctacatgcaggtgacaacgagatcggtcagtatcatgccgtcctgatcgtcctgatcgaggaatgaggcgacttggagcttggactcactcctcccgatatgcgtttcgacccaagcgtcctcgtcgtctttgacgaccttgttcgacctggtctttccatccggacctgaagcttcttctgcctgatgtttcgggtgcgtcgaaaagcaaagagaatcagtatccagcatccgcatacgacggcggcggtccaaggacaacaaaggaccgtgcgagcgtatgagggatgaaactcacatcatcgagaaaactcaacaacctctccccgtcctcctcgttatctccatactcgaccgccgtcgcccgacgtaaacaaggcactgtattcgtatccacccgaacgttacgtgggtgagcatgtcagtgacaagacgacgaggacgagaacgagattgagcgtgcatcgacactcaccgttccgggtgacgaggtattgtttatccgtaggtaagaagtccctcccacgacccggttcccccttttgcctgtaccgagttcgagtccgaatccggtcgaggagagtcgttcagttcgatttaattcagttcagctttgtagctcgagtgtgatcactctgatcaaaacaacaagagagaagcggaagggggggagacgacggacataccaactccatacggggaacttgtatgacaagaaatcacccgcggcgacaaactcttccggggtgagtcgaccgtgttccttgaacttggattctttgaggacctgcgagtcgaaatgcgtcgagacggtgatgatcgtggtcaggagattagggggaggtgaaatgagagcgtggtaggtaaggatgcgagtaaagagatgtcgacaagcatgatgatggcaaggttgaagaagatgatgggacgatgatcagcctacccgagatcaggtacaaaagacacggaatgcaggccggcttacaggtgagaggtaatcccggacagcccagtattggctctaccatagtataatcgtcatttggtcattgaagtcaaggggggtggtagttggtggtgtcgtcgtcgttgttgttgttgtgatcgcgatgatggcgagttgatgggatccgaatgaatagggttgtcatagttttaagagtaggcggcatcacagacccccattcgtatggtaagaaaagacgacggcagtcatgttccacaagatcgtccagaaagagcaggcggtacgtcgttcaaagagtaaagtgtaaggcgaagaaggattgaacatgagcgaggtgaagcacgatagaggatgcgtgtgacaatgaccgacctggatggcgagcaacgggttgttcatccttgcggggggatcgacgacggtgaaggatcgaactaagaccgagagtagagcaggatattactgtccagaatggtcagagtgggagatagatggtggtggtggtaatagaggagggttgatagtaaagtagttgttcaactcaagttcgagttggattacgacgagaaatctcgggatcagtcgatcaaaagtaggtagagaccatgtagatgatgatgatgatgtccatgtcgatgatgtcgatgacgaccaccaccaccataaggacacaggacacaggacaagggttcaagtgggacaaggcactgcagtacacatccactgcggcgacctcgcaagaatgaccaccgtactcatcgactacttgaccaaattatccgactcggtcgctcaacagaaacccactcgactctcgaaactcttcaaccagacggccgaccccattcaacatgtcctccgagcattacataccgagtcgagaggtagggtcgagaaacaaatgttgaccaatgtcacacatcgaagaggcacggctttggggttggacgacgagtggaaggtcatcgccctggaaagagtctgggcagggtggatggaagagaacgagagttggatcgaggcgtgagtcctgggacgttcttgctgcgactatcatcgactcactgtctgctacccatcgatccgcatggaattgtccgtcgtgtcgtcgacagctacgaatcacagaaattatgcatcaacacctacatccggtactgctccaaccataataccacctcgtggaccctaccccccctctacaccctcctacgtgaccttcagaccctctcctcgaacgcgacctcggaattccaacgtcaacaacaacaccaatccgcccaacaagccgggatcgggatgggtatgggtatgggtatactacccctcacctccacggcaggaacgtcgagcgagatgaaatacgaggaagactgcgcgagggtcttccaagcagccttcaaactctgcgtaggcgataggtctaacccgcaacatcttagcaagaggaaaggggtgtataggatggcttgtctcaatctgaaatggtatttcaaggcaagtccgcagggtcgtcgtttctcgggcaagatgagtgggggggagctcatcctgcgcaattatgattatcgcgggtcgtcgatcacctcgtctcgtctctcgtcgctcaacccgaacgcccaaccggacgtggactcggacggcaacagatcgaccggacgaacctctcgaaacaactcgtccgagccgtaggagccgacccgaccatccccccgctagaacagtacaggatgtgcgaccgcgtcacctggaggtattacctcggcttgttggcattcagagcaggggaagacgaggtagccgatgaacatctgacttgggcgttcgagaggtgtcattcgggttcgaggaggaaccaggagtgagcatgggactgggcgggccgagagggtagacactgatgcgctcgtctcgtcttgttccggcgttggcgccacactccccagactgatcctcaaacacctcatccccgctcgactccgtctcggactattcccctccccgcgcctctttgcgcaataccccaagatcgaacggttgtacggcaagttcatctcggccatccgcgtcggcgacgtcaaggcatacgaccgcgcgttggaaaaattgcagagcggcgaaatggtctccacggacgaggagatggagatcgatgggatgggcgtggatgtaggcgtctggatggcgctcgaaaggggcagagaggtctgtctccgagggttgatgcggggcgtgtgagtagggatccttgcagggaaggaaggtcgagtcggaccgctgatcacggcgtgcggggtctcgggtttgcatgacgacaggtggatcgcatgcgacaaggattcgaggatcccgatctcggcgttcaaattggccatgcggcatcaggggatagacgtggacgacgacgaggtcgaatgtctcgtcgcagggatgatatggaaggcgagtcgcgtcgttcgccagtcgcgcaaaacgctacagacctcgactgacccctgctcacaaccgcacctttgtagggatacatgaagggatacatatcgcacgagaaacgcaccgtcgtcttggcgaaatcgggaccgttccccgcgcttagcaaacgggtcaaaccgacaggtgggtgaggtattcagggacgggcatgccttttataagcacgcgcccgcttgtacaacgagggaccatatgacgaacgacatgacatgcaacgaggctaggaacgagtcggcctgatcctgacgatcacttgacccaaaaaagtttggatcgattgcgcccgcatctcgacctcgccccgagtcccgtcaaaccacgcgtcctcgacgtgctcgccgacgacctgcctcagcccattcattacccgaacggcagacgcgcttggaaccggatcgcatgtgctcgacgaggtatcgcaggacttggcgcttgctaggtcggttaaccatggccgcgacgtagatgacgtcttgcgtcgcgatcgtctcgtgggacaggtcgagcgcgttggacgtgatgaaacggacttggccggatttttggatggtcagatgttggcgagctgctcggccatctctcgggcagatgctgcaggcgtgagggtcttggcgcaagacagctctcgagtcatggttgcgtgttacaacgactagtcggatccgaatcttctaatccccacgccatgaagagtctttatgcgttacattgtcgagcctatctacagcgggtgagccagaccagtcaagattaacgacaacgcaaaacgggcgaccgttgaccgatactcgtgattgtagcggcggtcagaaatcccgcttcccctctccttcctttcgacgcttcttgcgtggaccgcaaggtcgcagggcacctgacggtctgatttcctctgataaaacagacccgctcgctcaattggctcgagagcgaagcgagacgagacaatatgaaacgcgtattcccaacgctaccaggtcccagagagggtcgcttgactgcagtcgagcacggatacttgtcggccaggaagatcagccgctgaggatcgtagcggaaccttccagcttggtggaatgacctgagaacgccagtgtgatgcaggacccggaaagcgggggaatttgtagcctagacttcacattttgcacactgacaacgccagagtgccgctcaatcacgctggacaccatgtcgctggtcatgctagtttcaaagcgttctgcacatgataatcaaggctgcaagggcctctccgccattgggagatcggctcaggtcgagtttcgttgaatagatacaagacagaattcaggaagtaaccaggcccatctgcgatcattccattctctgggttacactgatagttagacgatacaaggtctggtccgacatcgcaaatgtgtaggcctcgaacgcatcagctattttggtagcaggcgcaaaaagtctgatcacggaccctatcgacctacaaagggattccccgttattgtttgtggcaaaacgagcatgaattggggcaccccaaagcttaggtttcatccagactatcccagatggagacgattcaatgctcaggcagtgtttatgaacgaagacaagtgccccgttcccaagaaaatcgcaagtagtgaaggatcagagggtagcgaaggagagtcttagtaaagcgattgtgatagtcgagtacattggtatacaagatgctcgtcaacgccgcaaggctgattttcgagggtaaatagaagaagagacagattggaccaccaaggggtcttcaaaatagtatacagtggcagcggaggacttgtagacttgatctcgtaggcaagagaagacgacgctcgccgactaagccaagccccggtcacacctgtagacggccttccattccttcttctcctcgtcgagatgcacgacctcgaccatcaagaacctcggatccgatttcaaacgagcatacatgactacggcgtcatccgcctgtatcataatgttcttgttgtccagctggatgcaacccgagttccagaggacgatttgcgcgcccataggttgggatagcatgcgctcgatgatcgaggcggttttgacttcgagagcgcgggcgagaagcgcgagctcgataggatctcgagtatccgtgctcaagggtgtatcagacccctggatggcagggtaggtcgagggtcgttgtttagacccgagggtagccgctgcgtgagtgttgacgatcttgggtgcaacgaccggttgagaggtgatgagagtagtagacatggcgtcggtattcgctgagtgtgtttgggtaaggcggtgttggatgtcgagctgatgtgacgcttcgtccgtgttttggttgatgcaattcaagatcttcaggagtcgaagcgatgatcttattcatcgtatcatctctgcgtatatatacaccatccaggagcccaggatgatcatccatcggtcggtcttgccgttgccgccatacgactcctttctctgggcaagcttagcggcacccaccgctcgggccggaaattctctccattcaacccctcttgtcccctgatagccggctcccagctaccccttgatagcataggtcaagatagaggacgtccggcccgtccctttctcgacgggtcatcttggcacgaccgcatgctcaaacacgtcggggcgacgctaggagggacaacgtgatttctccgtgtcgacacgaggaggaagagggggtgatgaccctccttttatcggtgacctggactctgggatgacaaggcatatctgtcaaaggagacacgcaggtcgacctcgaaaggggactccgagggagccgagcgaatgccgttcaacgtgaggacgacctggcaaatcgggaaatcaccgagttgaaccgaggaaacgtccagagatacgcagagctgtgatcggcgcaaactatcggtacaccgtacgcctgaatgtgaagacaagacttgacaagagagtgcagtagataagaagcggcccggacgggaacatcaagatgggtagataggcaagcttttggagtgtaccacataaagatgtgcaggacctgaacctgatcatcaaggcactctgtctggcgtctcgtctgtcgacctcgatctagagctcagctgaacgcccggtttacaagaaatcccggccaagacagaaccccgccccgcaccggagctcaaggcagttcgctcatatcttttgtccatgcctcttactacgctggtgaatcgaagtctgcgtcggggcccaccgaactgaaaggaagccgaccgaggaccaacaagaaggtaaactcgttctaacgccgttacataccaccttacaaacattccatcgagtcaaccgatcacctcgatcagaatcacacctcatacaacgccaagatcgcggccttgccatcgggttcttccttgacgagacccaagtgattgaacaacacgccatcaaagtcgagcatcctacccttgaagtcacctctctcgatgcggcggacgagcgaattgacgaatccaaaggacgactcgtaatcgacgaggttgaggagttgagcgcggaggagccggttcctcatctcgtacgcacacgcttgggacactttgaaaccggccttttctgcactggccatgacccttgacaacagacgcatgaggtgcgtctcgcggtgagcagcgaggaagcagtgatcttgacagacgtttcgacagtttcgagagatccgcttgccgaacggtctcaacagagggaaggctttcttgcctacggtcatgacctcggcgatcaccggttgaacctcttggatgtaccgtaggagacggaacgcctgacagatggcatcctccatcatggtccgcttggtggcgagtgcgtgagccaaaaagctgaccggtttgcccgagccaaggtcgtacgccatgtcgctctggatgatcgacatacttttgcggatcgcttggctggcatcgacgagctgcatgtagacggtctcgatctcacgaagctttggaggaggcagttccgccatcgccttcatcgtcctcaaggcgataccctcgaactgtaaatagtaaatccggcaagtctcatggatcggttgtttggggtcgtccaactggagctcggtcagtattcccttgcgagtctgtttgatcgacgtagtcagagggcacgcgctgtcgtgggcttggtgatggtagtcacaccagtgcaagggtttctcgagtggacctgcgcattgatgggtcatcagttaaaggagcccgccgacaagcaagaaaggatcggactccttaccatagtacaggaggtctgccgggatctcgggtgctggaggtagatcgggaggagaaggactcgtcgattcatccggaaggaaagttgcgatcgacttggcttgctccgtagtgggagtgtcgggcgtggtcgagcgctcggctgggggagcaaatggggtagtcggatcttggacacaagttgccattctgcagtatctcggcagtgtcacaggttggcacgagcgatgatcgaggcatccagtgacacgtctgcattcgccacaacgccaaatatggccagacaattatatacacgttccccatacccacgcaagatccaaaggttgtacagcgaatcagcgccagacgttgctataaaggaaggtcagcgtttcaccccctgacaccgatttcgtgcttctcgattacctttctccgatttcgactgcctggagcacgacatgcgtctgcacgtttccgcaacacggcgacgagtggcaatgatattgtattatgtgatatgctgatgctttgtgtgatatgctgtgctgttgttgtactaaacaacctgtgtgatgctatctatgagtctacattttgtcgattccttccatcttttgagtctttcgagtcctcgttctcttaggggtctgcatctagcatgagaaggggtgagaataagtacccttgttgtactatttgaaaaaatgagctgttgtcagtcaacgcgatcgagactctcgggttcacgaagcaacataccccgttgataattccggtgacagcagagtagattccaagaggagtgaacgcgacgctcaaggtgatctgaggcggtaaacacagcagagataagcgttgtctgctaacatcgaacttgacctctcactcacggaaatgctggcacagaaaaagaagaacgtagacatgaggctaccaaagtaggcctgcttccatccatcggccttgacctgaggcttgcgcatgaagaaccaaatgattccgggaacaccgtatgcggaccaggtcgagaccaaggacgagataatggtgaggagttggttaaagaactagaggcgggtcgatttgtatcagtacgattgtcctcaatgtgatcaccgacttcgacgatatgctcacaggaatgagctcggcaaagatgaaaccgaggatccacatgccgcagacgattccgacccagatgaactgcgccttccaacctctgcatagtcaagtcacgagatcagtttttgtcggcctcaggacgtcgtgaccaagacatgcttacccagaggtcaagagacgggttcctcgtagctgagtgacgtaaaagtacttggcaccgatgttgacgctggaatggacgttgatgatcagcatattgttgatgtcggaacctcataagcggcccaacaagagactcacgcgacgacacccgagatgatgatggtaacaagaccgaacgcataggcggtgatggccaagggacgggtagtcatggtcaaagcgggcgaagtggtgtattgtcctccaaacacgtagacgagcgacccgacgagcgagtagaggaagagttggagaccttggacgatgacgaaggattttcggaagtccttgggagccttcatctcggagcagaaggtgaggacggccatgttggtaccgaaagtctgcaagggaacgacgactctatcagtaccacggctcgtcatttggtaatacaggccatgtaactgacaaagcagactaaaagagtggattcctcgatcagctaaacattgcgggtggcagcgagactagatcctaaactcactgttggtcatggctccgatcacgtcactgagggtagcatcgtagttgatgaccttccattcgataggcacgttgttcttgaccaacacgctagggtcttgaacaccggttccaatgatggtgatgaaactggcgacggtgatgcagctgaccgagaggatcgacaagagggtcaacttgccaaagtgtcgctggagggagagctatcgaggcaggatgacgaaaggtcgggcatgagccctctgaatagctggcaggacgggacggagggggggcacacttaccaggaccgagacgatgcagataaccacggtaaagacgatcttgcaaacggcattatcgctaatgttgctcaatgcgatctctccggccaaagcgtggctcgcagccaaaccgatggatttgaccatgatcatcaccccaaagatgatccctccgatcctgccaaacatgatcgtccccgcgtcggccacgttcatgcatcccatgtaacggagcttgaagtcgatgtagatccaggcggtgatgtaagccaaacaggcgaggaggatggtcgcgatcagaccaccgacgagtccgagtcgctggaagatggaggggaaggagagcagtccgagggcgatggcctcggcgagacagacgaatccggcctggacccaacccatggttcggaaatcgacatggtcgtcgttcccatcgacatgagcggtaaagacgtcttgagtaaactcgtcttcctcggggatggtaggttccctgacgtccccgttgaacttgttgttcaggttgccattgttcatggccttttcgtcggcaaacgacgtgttggtcatggaacgggtggcatcgctatcgagcgagtgtttttcctgcaaagggttcatggtaggctctaccggggtagactgggcggtgatctcgttctggtggtccatgtttccaaagaaaggtcgtctatgtcaatgttcaatggcgaaaacgggctagctccacaacaaaatcggttgaacgtgaggactgttttacacctgagtgtcctatatctttgtgtatccccgtcctcgacgtctcctcgcacggcagcagcgtaacatgaccaatcgtagatctgctccaaccgctcaatcgatgactggcccgttcgaaaaaaaaactgaaccatggcctggcgccgtgctccgtctaagcgattcggacggtccgttcggtgcgagatcccgactcggttacgtttggctatagggaagaaaccaaaatttcgaatatgtaccgtggggaaccgagatgtcgagagtctggggcagtcatgtcgtcgtctattaatggccggccatgcgtacgtcgtccctcggtcacgccgcactcgccgccttcttgccacccgctatcctacctgaatcgcgcgctaagtatgtgtatattcgaattttttctcactttgccgaacctcggtcggtttctcgaccgggacgctctcgagatctcttcacgtgttgagagagatggcaaatgggcaaatggccgatcctgacaataatgcggggggaaaaggtccaacgttcaaacgccagacgagggaaaaaagggccccgaaaagatcagactcgccatggtaaatggcaaataagcgctcctcctcgctactggccattttaggcgatgttggcgccgctccgcttacgatgagatgcggagatctcgagattcatttgccattcatgccatccatcagcgtgacgtcgccgcccgaccgagaggacggaggttgatgacgaaacgtacggtcccgagccttctcgggtcgggtcgtgttgtttcgaggatgacgggtggattcgacttcgggatcgtctccgacttgcaacgagcaggcaaaggtcgtccgagtaaaggcgataaatggctcggatgttcgaggtcataccagtcgactcatcgagtggatgttcagtactgcaaggcgagcgtagtcgtcatcgtagtcagtcgacactgcacaccctgaatatgctggccgacagagagaccgcctaggatcacaagtcaagtgacactcgggacggctatcgaggagggacgtcttcctctgcctgaaacgaggccaggatcaattaccagacacaaaccccttaagcttctcatcgttgtatctcggctgaactaccgctcaagccgcgcagttcctgacctacatcaagaactaattcgaaaagaccatcgacgtaaccctcggaccaagtgtaactcccgctccccgggtgcctagtgaatagacggagcagactcttcatatagctagaccacacacctcagctaaggctaggtacgtacccatggatcaacgccggacggtcttcacgtatcgtatcatatcatctccgacctgcacgcctctctggcatcccgggtttgttcttcttagaagacaccatatacacacatgtgttctacgctcaagacctcggaccagatcaatgtagcacgggcgcctgtgactttggcaacttctctctctccgagacatcgtggacgagcttagggccagctcgataagatggctcgtctcgtctcatcccggtcgttcgtggcgtgtctttatcggacacgaacacttctgattgaccgtgggcgtagaaggatgaaggtcccgagatcggtgtgagcgtgtgtgggcgtgtcgctcgaatatgccaagtcgctcttgtggcgatcgcgctgcaattgcaatctgatcgtgggttgacctctgagaggactttgactcgaacccgaccggaccgtaaagtaccccgatcgacctgcgcgacctgcttgccacttgcttcctttgtaatctgcaatatatcacacagtgttctaatccggccacccttctatcgatatggccctgagccagccactactctactgctgttccaatgtcacttgccgaagtaggtcgtcggtcgatatgagcttggcatcaatttcctctctgccgtgcctctgccggtgcgggagatgccgggcaacccaaagttgggcgccaaaagagacctaacaagctgcacacaactatcaccctacttggactccagtgaacctcggctctcccctcaccgagcctgggtcccatgtcttgttcattgccatgccatgatcgtaggattgtaggttgatcccgtcgtcgtcgtcgccgtcgacctcgtcgtcgtcgttgtcgagatgaccaagtaagctgggccaggccggggtgccgccccgggatcagattcgaaagtaaagtcacataggtcgatggcgatgggacgacaaattattctcatatcgtcgtcgtcgtcgaggcggccatacacacacacacacacacacacacacacacaccaacgtctacattaggaactgacacatgtacttgtaatcaagatgcatacgctcaggagcgaacaagccattcgacccgatctttgcgacgacctagaacgtttagacgtctgacgaggaaatgtgaaaggttgacccttcgcctcccgtctcctcgaccaccgaccagaccagaccagaccagactagattagactaccgataatcaagcaccgatcattcggtcgaccatgtcgatacaggtcgatcaggagaagaacaagtcagaccaaggacgtacggtcgagcagataccatccgacaggcttcagaggaggactccattatcgggttcagtcaccaccccgactgagctgacgagcgatggacagacccagccggacgatgatcacaggtcctcgtcgaacaacctcgaacgtacccatcaccctgatcccgacgccgacgccgatcagaagaaggatatgaagatgttcttcaaatcgagcttgtacagccttagacccacacggcatgataccccgaacaagggggacgataagaaggattacctcgtccaccctcgacatcgacaaccaagatcaactgctctaacccacggccgtacagaatcggatgaactcgccgggatccctgatctagtgagatcacactcacatacccatcaacaccctcacgaacatcaacaacatcatcatcatcatcgacagaggacgcgcggggaggaagaagaggatatggatactcctgggacggaggatgggtatgagagggcctttgaacacgggtcagggtcgagcttgggagtaggtaccaaggaggacgagcagagggtattgagaaagatcgatagggtgagtggaccggccgggatcacggggggtcggcgagggatcaattcggatgggccggcgtgtgcaagagaggctgatccaaagatgattatccccacatctccgtcccccctccacacacgctcgatctcccactcacctcggtacccgggaataggtcctcatgcccctcatgatggccgcttataccctgcaatatatcgacaagagcgcaatgtcatacgccgccatctttacctttcgatcaggcaagtcctcgattcgccaataaacggtctcttccaatgcccgttgagctgacgatcgtagcctgccgccccggccccgctgcagataccaacctgaccccacatcaatatcaatggctaggctcggcctactatttcggctacctcggattctccctccccaacgcctactttttgcagaaactcccattgaaacgttacctcggagcttgtatcctcgtctggggggtcatgctcgtattgatgagcgtctttaggacgtttgcagggttatgcttctgtcgagtcgccctggggatgagcgagggcgtcatcacggtgagtcccgggcgagtcaccgagggggatcgaaggagcagggactgactcgatcagtctttggtcgacgctgcgttggatagcccgggttcgtcctcctcatcagtcggttctataagcgcgaggaacagccgttgagggtggggatttggtactgctgcaacgtgagtcgcacgtcgccgtgatcgactttgcgcttcgaccaagacgaccaacccgtgattcttcgcagggcctgggatcgttcatcggtggtctcatctcgtacggtaccggacacatcgacgcaggacccaatatccccaactggatctggattttcgtgatcaacgggaccatgaccatcggcgtgggcgtcgtcttcctctggatatgcccggaacaggccgagacggcgtggttcttgacaccgcacgaaagagcggtcggcaaggaaagggttcgggggaatatgagcagcctggagagcaaggtgtggaaatgggatgggatggcagaagcattgttgccctggcgcgatatgcaaggttggatacgtgagtcggcattcgagcgatcctcgaacatgcatgtgactgatccttgcgacacgcggttcggtaccagtcttcctgctcgtcacatcgtactgcatccctaatgggggattggggaactttctacacctcatcctgcaatcttatgggttcacgccgttgcaaaccatcctcgtcggattgccccaggcggccgctcaggtatttatcgcgttgacggggagttttatcgctcgtcggttcaagaattccaggactatcgtcatggcaagttggatgtggacagcatcgtcgtttgagcacgcactcatcgcatcctccttctctacactcgcagatgatattcgtgctcccctcgctcgccggcgtgtccatccagtatgcgacacggaacaccggcgcgctgttgtttggatactacattttacccgggttcgtggcgggtgtcggccaggcctttgcaatgccaggcgcaaacgccacaggttacacgtgagtcgactcgagtcgctccccttgtttgttaataatgggctaaccgcgggcccgtacagtaaacgatgcaccgtatcaagcatggtctacgtcgcctactctatgggcaacattatcggaccccatttgtcagccgcatctcagagcctcccgtcgcctcatgcactaatgaccatccaatccttcagctttgacagcacggaaaacccgccttaccgctcgggcatgtttacttgcatcatttgctttgctatcagtatacccctggccctgtcacttcggtccgtacacgacgtccccgctcacgaccatacgaccttcagctgacccggggggttcaccgttattagtttaatgtaccagcgccagaacaggaatcgtgatgccatcatggccgcggcagggacttgtcatgacccgacgctcgggacattcgaggacgtcacggatcagcgcaatttggtgagtgtgaacgacgtcatctggtagcaaccccactgatatccatgcgcgacggtcagaactttcgctatcacctgtaaaatgcgttcgttttctgttcggtgtgaattggaggctccgatcccgcatcatcagtcaacaggtcacctagagaatccgaccagccaacgacatgatcatgatgaaagaaaaagttgtatctactcccgaccgaaatttgtaacgcgaacatcatctctaatgctcttggcatcaaacgttcaatggccgacaatcatgatttgtcgacggtcgttgggttttgcctctcaatctgcgacagttcactacgtctcggaatgcccctcatctcggcagtcaacgaaacctgtttcgacatgaaccaccatacagtttcagatcggggactctcgcaaacccatcgcaggtcgtcgaatgtacgacacaaggccagtaaagtaagagcggcatggccgacgttctggcgaggtgccgacatggtatcttgtcatgatcgcaagggcttgctgaggataaccatacaaatacaagaaggagcggtcgactcttgctcacaatacttacacaaatgaaccgatgccgcttcaggcgcgcaccgtgttcttcatcatgaggttcacctcggcaacgtcgacatccatatcatccccgccacgtattcccgcaacgtcggttccgccggcacatggagttctcagagatactccagagtctaccgtggagaagcccgattgagtcgatgctcgtttgtctagagcaggcaagggtaccatcatcagcgcgaccgccaccggaaagataccgccatttacgtggtcctcacctcgtgaccgcttctcacgtctggcctttttctcgcgcccccgtacgaggtcatctactttgttctcgtctccagcgctttgagcagagccagtactactcagactaccactgaccgaacttgcgtcccacgtcgtccagttctggcaaccctcgatgtaggcaaagaatgcttccttgacccgggctctgtatgcctcgagccgttcctgaccgatcctgatctgggccactcggcgaactttttcgaaattgcgttgacagcgttccagtggtacgacaggctcgacatcgtgagcaaaggaatgcgagtcgatctctgtagacacgaggaattcgagaaagcacttgtccagattgggattgaaaccttttccttggcgcgctttcgaatcggtccgtttccatgcttcccacctgaacagtgaaggacgttgagttcgtgaagatgaattggcccacgattaaccgagtttgtatgtttcaactcacatcttctcatcgggaagcacatcctgaaacaaacgaatgctgatagagtcgacacgggttctgcgcgcttgcatcgtaaacaaccgacttacgagcatgattctttgctttcgctgctgttcctgatagtccccgaccatcatctcgattgctcagcgtatcgcctctttgttcgtgtcgagcggagtgacaaatcgacccggctgctaaattgatcgacaggatgaaccggaatgatctacagatctgaggtggatgatcatgtctaatccgaggatcgttcatattcgcggttctgttctgaggggcgagctataagaatctccgagacattgctcaaagtctccataggaaccttaatcaaaggaagcagaacctatcccctttcccccgcctcccccttgtgtctccttcccaggtctaaaggggcgaacaaggggagacatgaaacgcctgggacgactgccgaatctcgatgatgtgacatgtgtcctctcctctctaagcaatgttaatcatttctagtcgccagagtccacctgtcctttgcatatacaacaaacttttcattttcacttcttcatgcgtaaaccccattttggagcggtagatcatgtcaagtcgttacggacgagtcgctctgcatacagataggtgcgttcagtggtacgcttcacggtgcccgcctcgtattcgtgatgtgatgtctcatattgatgtcttgacggtatgtcgatgggtatgagccaggcgcagaacgttggcgagatcgcttattcggagaggcttggatagaaagtagaagaatccttctttttgacaacgctccttggtttcctgccaaaagatcgcagtaagtctcgtcgatcgcggcgtgcgtccaggtcaagggacttacctcgtcagtgttggcggtgagggcgactatgaccggacaattggctggatctttttggtaaatgatgtttcgagctgtgtatccatccattgtcggcatctagaatgtcacgctgtaccatcagggtttggcaggtcatgtcaccaacgccatgactacccacctgaagatccattaggatgaggtcatagtccgcctttgcagcggcattcactgctactcgaccgtcctctgcggtgttgacccccttgtaaccgaatttttccaaaatctaatgcaggctcgcacgatcagatcagtgttgtccaaaattaatctggatttgcatcgaaaagcttacttttagcccaacctttacgttgatgatcgaatcatcgacgtaaagaatgcgcaatgggtatgtctacagttacgaggctttagtagatgcaccttgatagccaaagccttgatgacgtgaactcacaagagcgtatcgattgtccataccggacttcttggccactgctccaggcagcgccgcccgcttgacaggcttgggtcgaggctctctagatggcgagctgggccgcgaaacagattgcgctgcggggctgctcaactgtcggcaagtcgcacagtataaagccatggcggtgcacggcttgctcagcacggtccaggactcctgatccgtacgtttcttgtagctttccgcctccatcggtccgaccaggagaacaagctgagagatgggatcagcatacggcgccgacaacgaaaactccaagaatatcaatgtcacatacttttgcctttggacaagcctgccgaagctctaacacgatctcatcgctgagaccttcggcaacgatgtccactatcaccagatcataggctgggcctttcgcagcctgatcgatcaggccgcctagacgctcgtagatactggtcttgatgttccaagtttctaaatttcgggtcaaagataaaaagcgagacggatgcgcagtgacaagcaccgcttgctgcggtggatgcaaggcttgcgaccacaagggaagcggagcctttggccccttcttggtcgtgaccaagagataaaacgtcgaccctttgccctccaccgactcggcccagcaatcgccgcccatgactcggcaaagaccacgggttatggacagaccgagcccactgcccccatgtgaccgcgagatcccggagtgaccctgtacaaaggcgccaaagagcttgttcatcgctcgtcgtggaatgccaataccttcgtcctggatagcgagcgttatgtcgacagaatcggtacgctcgtccagtgtccagcgcagtcgaaccgtgggcttcgcatcgccgtgggccagcggggtgaatttgagagcgttggacagaatgttgagcaagcattggcgaagcctatgaggatctccgaggagcgtccagaccgggtccgtgtccaccgagttctcgatgaccaactcaaccgactttgcctgagcaatatggccaaccgtaacggtagcggcttctacgatactacgcaggtcgaaatcgatactttcagcttgcaccgaaccggcgtccaatttcgaccagtctaacactgcggtgacgatgcgctgtagatcgtccgatgattgcttgataatgcctagattttcacggtgcgcgatcggtaggtcctccgagttttccattacagagcataaccccgcgacagcaaaaagaggggtacgcaacttcaaggtaagacatcgcagaaagagtcagatcacgatatagccaagaacccccttcagtacgaatcacggctcacctcgtgcgagatggcattgatgaaagtctgacgatgagccaatgcctgctccagctgattagtgcgagtctcgactgccgcttccagtgcggcgtaggcgtggtgagacttgaggatgatggcagcgaatgtggctagtaggcctacgtgggacgtgctcgaagacgggaccgtggcccggttcgccaggtagatggctccggagagtcgaccttgtacgaacagtggtgccacgatgaccgattttggcaccccggcagctctaaagaacggctctctttcgaataatttgctgtgcacggcctcgccaccattcgtggtattgattggctgaagagccataacccgtcaacaaggtacattagatgatcgaattcttcaaggcgcacctttttggtaacggaaacgtgcagcagtagcgatgccgggcataaatgtccggcgtctgcgagggcgatctcacagacctcgatatcgtcgtgtgtaccgtatcccttgagctgcaaagccccttgtgcatgatcttgtatcgcaagacatgcataggtcgtcctcgtcaactgcaagcgggcatagtgagaaacgcgaacggaattgggagatttgcaccttacctgcatcaacactgacaagactcgcttgatgagtccttcaccatctttctcgctggccagtaatagcgaagtgcgcagaactgattcgagaccgatcttgattcgaaggctgctgggcccggctgccatgcccgcgatctcctcgtcgggcatgctcttgctacttgcggtcgcgggcgagccgcaatcgctcacagtaccttcctgggcaaggcgtatctgctgtcggttaccagtcgcgtctagattatccaaagctctgacgagattgattgctccgcattgctcgtaagagttgcgtgccgattgcacgtagcctcccgccagacgggcaggcaccggccctgcagatgcgaggacagctgacacccgggcacacaatagacctagtgtcggttcggccaacgaggcaagtcttagcgtcatgacgagaacaattgagtcgatcgtcttaccttgtagcaggtacgcttctgcgtcatggagccgcaacattgtttcctcaacgtgttcaatcagagagatccacgcgagttgctcttgcctgacttgtttcactagagccaggctctcgagaaggcgcagtatagccgcaaagttgaggtctgtcgggattgcatgttctcacgtcaacacagacgttcaataagaggacgcgtctgaacgggacgcactttgggtgaactttcctaggtgagctttggcattgtcgatgagctcgtcttcagttggctgatcagtcatcaatgtccagatggctaggagagtgatagccatcggttgcaggatcgttccatttcctccatgttggaagcgtttcaggagtgtagcgcgttctgccaattcggcttcaggcacgtcgtagagaatgcccaaatacatcgacgcgagcgcataacagactgcgtagaagggcgctgtctctggtacccgctcgatacacgctctagtcacgtacgccccgtgtaaccctggaggaaagcgacgtcgggggtcagccagagttcgacgcaaattcggacggccctcagtacgactgactagacatccgtagagggtctccttgactcgccaaattggccgccatttgtacgaacgaagtggccatcagtttcgatactgcctgcaggtcttcacctagggccgccaatgcatgcttgcccctagccaacatttgtgtgatcgaatgtccagacagtccgagggtcgcaaattccagaccgcagacataagtcagaatgtcagggttcttggctggaaaattcgtcaggccgagagcatttagcggtggacggagggttgactcccgcgccatcacgtactcgctatgcagttctcccggatactcgtgtaatcgagttcggacaatcggcggctccggataagcctcacgacaattcgcgcaatatctgcagcagcaacgtaaggcgtcccggtcacgtcgatcgtttctgacaactcaagccagctttgtgctacatccaggttcaaatcgttcaattcctttgacgagacacatgcgattagttgacaagaatgcgacagaccacccgacaacgcttactagcagacccatgatagcgtatatgtaagcactacaaggaaacttgagagcggcagccgcacgttcttgcagcaagagtgtgccggccgcgtgaaagatcggccgaccaaaatcgggcatgaagctgtacggcagggcaagatcagtgaaacgtcgatgtgtatagttgtcttgagactgcttacgcgtagacagtcggtcccatgatcgtggtgatcacgctcaaagcgatgtatatccggtccgtatcgtcaacaggtgcctttggcggaactgtcacgaagcttgaaatgtgtttcgtatctttcgatgctgatttccacaagtccgagggcacattggccaagctgtatgccctaaccacaaagtcgcaaccgtcggcagcgtgagagcatgccaggcatagccgacagagccaggtcaagacctggatcttgagcaacggcgtcggagccaatccacttgcgcgttcgacctgtgcgaccagacggaggatataacttagccgactgagggaccggccgaatcatgggctgcgcacgcacctccatcatggtggaagcagcggatctgcgggcgatagccacttctgcgatcgcgcctaccagttgcaaggtagtgtcagggtcttctagccagttggcggcagtctctatagaccaaatcgtcctggcgcgctcgagatagcgttgcgctaagtcggacgccagacccctgatcgctctctgcaccgcctgtatcactgcgtttcagacaagtttgattagaggttcaacttcatgtattttgctcgtttgaaactcacgagcccggcaaaggacctgagttgtgacatcggattgtcgtaacgaatgcgctgctaataaaaggtctgcccggacgaaaatgagttctggcgaagagaggccttccagagcctcggcgattgacaagaacagcacgggcttgttggcttcgaagatcgaagccagaacggcgagatgatggcggtcgtgggaaaagacaacctcgccgttgtttatccgtatcacgttgctgtcgactgcaggcttgaggcatttcttgaggtgatcgacttgcgacttgttaacccgagccagtaggtcgagtttgacacctcgcgatggcaaccaggccagacgctgcaaggcatccttgagttcgggttcgaacaacgagaaggttctagcatgacaatgcaaagacgagcgagcgatcagacatgactggttgtcgagaactcgatgaggtctcaccttccggaatattgttcagatgacatggcgtcatagttggtcatggcctcgcgacgtatttgccattttcgggtatcgtagtcgaatcgctaaggttgcaaccgggtgagggacggtcccgctggcgaagagctagccgaggcaccgacttacgatcacattgtctcgcacatatgccaccaagatctggttgcagaacaagggatttcctatcgccatccgagatgacatcagtgcggagttgacgatacatggatcgacaggacgaaccttccgaagtttcgaggagcgagtctgccaagtcacgccattctggagaaatgccatccaagtgaaaacacctagcatcgagacgtattgtcagttgtgaggctcccacggagagatcgaggccaactcacttggtaagcagtgtcagcatcactccgcggtcgaacctcctcgcttcgatcattgtcgccttgaccggctcaatgtcgggcgccacggtctgctccattgttcgataggacagcacgatgaagcagtgttcgaccctccgcgacggcacaaaggccagctcgtaccacaacgttctttcgctaacttccatccactgatagtcgtcgatgaccaggatcagaggtcgatgtcggcttgcaaacagtcgaagtaacatagtagcccacgaacggaactgtttaatgtagctgtcccaatcgattgcctgtgtctcggcgggcacattgtccggcgtgttattgtctcccaagactcgttgccactcagccggtaacagcgacaggaacaaactcgaattggccgctacggcattgagaatgtcctttttccagatggtagggtcttcgagagggtcgctaaagactcgatcgagaagcgagcagaagacgctgataaatccggacagaggtctcaagagatgttgatccagcttggcggtcccgacgagacaatcctgcccggcattcttcatctcttgtctcgtcgcccaatcggcaatgagctggctctttcccgaacctgaacgaccgtaacagcaagcgacctcgggcgtgcctgacaacttgatgcgagtgtagatggtatccagttgaacctcttccgactctctgtccaagagttcgggagggaatttgaacatggcaagctcgacgatatcgccgatgagaaaatccgccctggtctcatccgacatttgcccagcacagatctgccggaccttgtgcaggtcgtgtaacaatgtcgaggcgttgagatatcggtcagacgggtccagcgccaacgccttttccaccaattgcgagagctctaccgggatggtatcgtgaatatccttgagacaagtgatggtccgggtcgaatgatgatggatagccgtgagaatatcccaatcgtcctgtccgacgtcaaaattctcgatcggtcggttggcgagaagctcgtaagctgctacaccccaggcaaagacgtcgacgctcgggtcggcggcataatcggctgctatgaattccggtgcgacatagccaagattcagtctgacatgggcgaagagacggacgtgcgcatgttaggtgagttcaacagtaacccttactcaacgccctgactcacctcaacccatgctctaccaactgcttgaccagacccttgcgtgcccaggtctcgtcctgtatcggcggactatccaagacccgggtcggcgagtcccccgcttccgctaggtacccgctcttgcccaacatcccggcctgctcgacagtagcaaacgttcgcaactcgatgctgaaatcttgcttgctcgtggtagaagccgatgtcgctcgatagaccccaccggtctggacggtgaaatagcggggacgacacatgaggaggcggtgatcccgattatgaagcgtctacgagtcgaaggtcgcgaaggattcaagcgtcagctctagtatgcctgctccggaaaacctggagccgaaactcaccgatacccaattggccatctggatgaggacatccacggccatcacccattgtttttccgaggcacatcgaatttcctcatcctcgtccgtatcatcataggccgccctgttgaccgcggcgggtgggatcccgtctgccgacccgcccgcatggtggttcgatatagctgcatacggtctcgaagatgagctagaagatatgtcggatggaagatcgggagtgtgcccgttttgatcctcgaattgggatcgatcaaccacgacgggcgaagggttagcggtccccgccttcggcctccctcgatagccctcttgacggacttcctccttgatctccttgagaggtcgaatccgactccgaacctgctggtcccaccagataggcaggatctcttctcgtcggtcgatactgaacacccagagaccttcagggtagtcgtgtagagcgatggcggtattcgagttgaagaggtcgtcggaagcgaggtatttccaggtcttgtaatgatgtcggagtgcggccgaagttagttggactagggggtgccggtcggagagaaaggatctacgatcagtaagccgaacttcatagtccgagctgggcctctctccagtcgaccgggccgagcgggtcaactcacattccggttgatccgcgagagcgacctcgaacctgactctgagcgggtacgagatccgatcacgatcctccgcctcatccctgcactctgtactcgggcctaccgtcaacaccgccgactcgaaagcccactcgtctgcgggtccgtccaaagttccggaacctcgaagccagaggtcggcgggtgaacggggttcgacgtgcacgtctcgtaaacctttgaccgcggtgtctagctgggccaaggtggtttcggaccacatcgccaagagtcgggagggaatccgagtctatcctaaaggaatcctacttgatatccgtgtgaagctttgctgatgaatgcaagtggccgagtcgaactgatcaagacgaataaaaaaaagacacgagacgacgtttagctgacgttcaggcccacaaagactcgcttcgccgccagctccagtcgaacggggacactggtgaaacatttgcttccgcgaaattggaacctcaacatgcctgtattcatgcatgcagcatgatatttggtcatgctcatgtacttttcacacggcacaaacgacaccactactgccacttccattgtgcaccgctcgagaggcacctctcgcctctcgacacccaacaacccaccatgttggccctcttggttccccccctcggcgagagtgagggaaaagcaagccgggtttaatcccgtcactagcacgcttcccgtttatgcttccgtgaacgattcctgcgggtcccttgactttgctcggtgccctgtggaaagctcacggtcggtcgccaccgagacgtcgacgaggcacacttttacaacagttgtagatcaccgtgagatatataatactgaccccgagcgcgaccctgacggagctgctagcctctgggcgagttaccattccctctttctgcagtgcgtctgatcgcacacgggcgacaaacctcggtgttcgtaactgcctggcggtacgacgggtccttgtttgagtgccaaaagaatccgtccagagaccacccgtgtcgccaaaaaaggaaaggaaaagacaaatgttccgattctcgccgcgctagacggcagaacccttcgttggcttacaaaacagaccaagacctcggccatctgctctcacttcccctagctttatagatgtcctcgcatatccggtccattttggcattggaacgcactttcctgcatgcctggccagtccgacattgacgatgggagcgaagatggtttatcaacaattactgctgaaatcatgcggcccacttggctgcgggaaagtactctagcagctagcaggccgccaagagggatcgtcagttaggagaaattagaaaccgtcttttaatggaatcacggagatttatcgaatatgctcccacgcgtctccgaagagtctcaggaacggaggatccaaagatccgtacaccctgtaacctatttggttgggtagaggtttgactgtcgatacggatctgatactccatactgtccgaatccaaggggaagatgcataggaaggacatggagctctctccctcctccctcttcatgtactccattcatgctttgctcgctccgttgtgtcaagggctgaaactgtcggtagagtttcgaacccctttcattacatctggaacgagggtcatcacacgaacgaagcagctacaaatgtcatcgttgaacaccggtccatcttaggcttgaataccgggtaattgtattcgtagatgcccaccaagacaaagatcaatcttattttgccaaaatgttgaccaagatccctgccatcgcctgttcgctcgttctcgcctctctcgcgcgagcggaagctccgttctgcgacaaggccgccacacaggtcatggacaccgcgttcgctgcatggtacggtgcagaaatcaccccttcgtctcagccggtgagtagggttacgctagatgcctcacgggctggtattgggatttctgactgagagactcgttgtaaagtatagtacgacactagaagcgccacgaccttcttggattgtgtcaatatctgccaagccgagaggaagcgtgaaaatgaaggtcaacccaatatggatgcgaacgggcagagtccacctcaaacacgtaagtcgatggtatctaattttcaaagggagagaggaatggaggctaacatcgatccccggggctcaggtggatgtcgatccgtcaactgggaggaagagagtaaatattgcaagacgtttgcgaccatccctcagaatgttctatcgtccatgtaccctcaggagggcaaggccaagaatggcgccatgatcgatccctgcgagagtgaacggatcgaggccgtcaaatttcgtaagcctctcgtcccttgtagcgatcgtttttctctttactggaacgtccctgcgagatagatgacagccctggaactacttgctgcaacgtgtggtatcgttggtagtgccaaacgctggtaaagcgcgttcagtttgagatgtgtctgcgagaccttgtaccacaatttcaaatttgcttcaactcctacgacatcagcgccccgttatcctctctgctgatccacgcagttatgaaggatgacgattgcaatggaaaatatcaacattgaaatttccgatggctttgatgacgtcgatatcgatgacagtttcgaccgcactttgctctacacgccgtaacgcgcttcaaaggcatccctgaaatgcgttgatcgtggagcaaaggaaacgaccaagggggctctaacgcacttgaactggcagcagtttgcctgcagcgattcgatcttggcgttcgagctgtacttgaatgggctcgaaaggacgggcggaacccctttcatctcaacttcagcttagccttgacccttctacttttctagtcaaggttcgtgtttcgtttcgtatacttaagcctatataaggcagggtccaatcatatcaaggttcgtaacttccctcacttaacgcacttcacgaaaaacaaacgtagtcctcgatcgagtcgagcagctatgagactcattgcgaattttgcaatcattggcgctgcatgggcgataagcgtcaaggcccaaagtgacaactgtagaggcacagccttggggcttcttgacagagggttcgccgctttcaaaggaagtgaacccaatttccacgactttgtgagtgatcacgggcagtaccaaggttcaccccacacctgataatgaaccgtgatctcagactccggagtccggagaggctttacctgctctgcttcaagaggtatctgcgtcggacttgatcaaatgtatcgacgagtgtgtgggatactggcctcccgtcgatcaaatcgacgcccccctcgaggatcagtacagtaagcctgcagagccagtagtgagtgtgactcgaggcttactcgggcatgcgctcattgccgcaatgcagagcaaagttactgtcgtgcggtcaaatggattcatatgtctaccaaatgcattctctacaaagttgctccagccgatatcagaatgtacaccggccctgatatctttcccattattggtggagctgtgatcggagagtgcgccggtgcagaggcgcagcgccttataggtcagtcccgcgacatgacgcgatccagaccgatggatatctctaacaggttattttcgcctcaatagcgactgaccaggaacagatacctagctgttgcgacgtgcgatacaggttcatcggagtagaggtctaactagcaaacatggcctccagactgattgttttgtccgttcgatacggaagatttgctgttctggtctgtaaagatctgttagcttattctatgtctcatcccgttgatgagaccgatgccgtaatttgtccacttcgcacagatgtgactatgacatcactcgtattggcacaacatagtcgctcactcgcgccagcgtacctgtccacagctatagtcggtttgtctcgaggatcacagttgtctattactcggatgatccggactacccctcttgcatcaaacgcgatccttatgaccggtgcatagagcgaaaacgggagaaggtgttcacatgcactgggactatcaacatcggagcatttgaagcggctagtgagccgatgccgatcgactttgaaccgaatcgcgcaaaggggatgaaaccacccgcatcatgcacaaggattcgcagcgcgagaaagggggaaacgagggcggaaagcaaggagagggacgctttccttttgtcctaagcgttgccatcacctcagacgtttcatagcatgcgagtcgaactgtaaaaatatgaacggacaaaaaatgccagcatgatgccaccccccacaaatattcagaccacactttgattctctggtagattgcccactcacaaacaacggctcaatcgtgaaacaagatgctgctcacgatgtcaacgagattctcgctatttttctccttgatggctcatgggtaaaaaaataccatggctggaactatcggccgtttaggaccggaatcgagagcaactaaggaactcgaaatttctccagtgtgtaaagatagtaatcaagggaatttgaacaccgtctatgcgattttcaagaacgccaacgctatttggcatggggatgacggcaaggtgattacgggtattctcacggacagtgtaaagggccgagactcaactcatatttggctaggttcgcagtatgattttatcgagacggagtctctgcgcaagtgcacagatttttgcaaaacggagctcgcactcgacgagaaatcgcaacctaaaccacagtgagtgtcagtaaagagggtgaaatctgaagcgttcgttgataatcgaccgcccgacggacttttcttcctgattctagagtgtttgtcaatcacttgggacatcacagaccgtctttgttacctttatagcaacaagttcgacgacgtggtagaaaaccaaaccgggtcagcatttaccgctgctgagaccatctttaatacctgcgggcggtttctgaatggcacgggtaaatgacacgacagcttgcaatacatcattgttagatgaggccacggctgatccttgcgcgtgttaactttcagacatcacggccgattgttgcaacatgggttacatgcagtagtcagcaactttgtatctggacgaccacagctttcgttttcataaggaatttccgttgtacacatagaaacaggtggtcgatgttgcaccttttgcgacccgggctacttgtcacttgagccggtggctaatcgagatgaccttggaccggtatcacgagatctgaaactcgttcgactattccagagtcacgtgacttcatcgatcgctaagctcgagcgatcaaaggacgaatgtacttttattgaccgatatgaccacagtcttgctgatggtgatgctccaactacggataatttcaatccggataacctagcaaaaccttccctggtctgttctaccatgtcggagagcctagaatcgttcatctcggccaagtttacagctctggccctgtccatcccagaagatgacgtgagtccagcagatcacttcgagatggaccttgtacaggcgagactccgttttgacacgcaacgtcatctcttatggacaggtagaatatatcgctaggctagtcgaggaagaggaactcgaagatgaagacaagaaggaaggcgtcaaggggatgctcgaggggttcttgacggtgagctccggagtcgaggggagaagtctcgtaatcttacctgacggtctacgatctcgcttctatcttgctgccatggacttgcctaccgcatcaatgaaataggaaggacaagctccggaagacctcgacccggcagtgacgacgatcattgatcactggagatcacgggaagaatcaagacgagccgaagaagaagcgaagaccagagaggctggaggtgacgacagcgatagtgggagtgatagcgggagcgacgtcgagggcgaacgtgagtcgattaaatgatacgagacgaaactcgggaacaggcggagtcgtcaagctaggcttcgacagagtaccagcgacccaccgtgcatcatcgtcgtaccgctcgctgaccgttcgcccatcccgaaccccatttttttagcctcgggaaagacctcgacgccagccgaaaagaaggcccggaaagccaaagtcaaagcccagacgacgctgctcgaatccctcaccccggaagaactcgccgcggcccaacgacgagccttgttggcgcattacgggtacgtcgacgatgatgctgccgcggctgccgaagatgccgggtcggcagggctgggtatgaggggcgagactttgaggaagagggaggaagaaaaggaggctcaagagcggagaaggttgatcgatgcggcgattcggggagaggccaagaggaagaagaagtcgaagcgggccagggagaccggtcagtatgggaacttgtcaagcgtattacctggtcgtcgtactgatcggggtgactcttgccggctcccagttgatctgatggcgcccaatttgaacaaggaaaaggtacaggttaaacaacaaatgttgcggcagatcgcgaaacaagaatcgcagagcgtacaagcgagggacaaggccgcgctcgaaaagcagaggtgagtcggtctcatcccattcgtgtgtgttgtgtgcggaatgacaggttcgctgaatcgagatattcgtcttggggtgataaaagagcggaccaagcaaaggctaaagcggacaagcagaagaaggctcagaagcaggaacgaagagcttaattgggcgggtcagacccttgtagcagtgctctgaccatcaatcgagatgaatgtgcctaggggaatccttagtgagcgggacgaggcaagcgggagcccacagatcagcgacatcgacaacgggttcacgacccggacctcagcccctggtgcaattccggtcaaaccgacgatgaccatacgggtgggggactttgcagccctcacagtggctatctatcggagtgagagtgtatacaagagcagcgggagtccctggcatagtcccgactccgccacgcaaggtgtatacttgcatccgtcgtgaacatatttctcctgatctccgtggcagctgaacagagcaggaagaccaagtcaagtgcaaacgcgagcctcgacgaacgtctcgaacaagctcaatggcgacaaggtggactgcaaggtcaaccgaggggatagcagccgacctcctgacacaggtaatcagtggcctggagatcgagcgagcccggatgggaggtcaaatggaatcgggattgatgcgagtacgacgcgctcagccaggggtttgacagttcggccttgtccgatggtcagggagataagcccgcgttcgttgttgtgatggaaggtctttatcatcgaattgttacaacgttcgagttgctagtacatcgtcctggtccgtcaagctgtctgactgtggaaagaaaggcaaacaggtttcgtcggtagggaagcatgcaggtcgtaggcgttcgtacccgggctcaccatcgctcgacgtcgtctcccgccccgatcaaccccgtctgccctcctgctctttcttctccttctcccccaaagcgtccttgacccgtgcttcttcctccttcttggcgttcaactcggcccgagtcatcccctcacctccggtactcttgggtaagttcttgacgatctcgctggatcccagacctccgccggtgacctgtccgaacgaggtctgcgggggagcgtcgttctcgggctggacgcggtgggagcaagggttagggtcggggttcgggggatttagtagaaggcgggacttgctttgttagacatgatactggagggtgtgaattgctatcaagagagtatagatgaaggtgtatgtgtatatggccaatgggtaaataggcgattgctgtacgctgtatcctatattgcctctcccttgttgcttgttaggtgactgctaggcgagttcgatgacgcgaagtgagggtgtcggaagtaaatccggatgtaaaacggaaccaaaaaggctccggcgtgaatcgaggatgacgtggcattcgatatcgacctacaattgacgaggttcaggtaggttgcaggttgcgggtcgcacgtcgatcttcacgagagatttgagccaaaagatcgtatagagtaggtacggaaagtgagcttaaggtttttttgatcttcaaattccgaagtttcgacgagtcggcataaatagctactggatataccaactatcggttctgattttttcttgcttcttgcttacgtcatcgaatcgaactcgcccacctttgccggtcgacgacgtatcagattcgactgcacctgttcaaatcgatacgacaatcgtccagcacgtccgggacttgcatacaatctcgaattcgtctcaagaaccgaattcatcatgtcggaatcaccaccatcatcaccacgtatcctgggcttgctcgtcgccggtggccagtccacacggatgggcagcgacaaggctttcctaccctaccccaccggatccgataaagatgtcgtagaaagcctgtggattcacctcgtccggatcatgctccaagtctgtccccaaggcgtcctcgtcagccataatcctacccaagcagccaggatgaagagcgagctcgacctgctggacgaagcccacaaggtcaggctggtacaagacgcacaggggtacgaggatatcggacccgccgcggggttgatcacggcgttcgatacccagccgacggataccttcttggcagtagcggtggatttcccattcgtcaaccacgataccctcgttcacctccgcgacgcttacgaatcacccgtgacgacctactttcacccggtggatatgcaccctgaacctctgctttccatctggtcgcccgaagctctggccaggttgaaacgtaacgccgtcggtggcgtagaaggagggaggaagaggaccggaccttgtttcaccgctaaacagttgtggaaggagctcgggatgagcggggacgaggtcgttgggaaatgcggggtcttgccaaaggtagaggccgacttgaggaacacgaacacgagggaagagtgggatcgcgcggtcgacgagttgaggctggcagtggtttcaaagtgaaagatgagggtcaaaagagacgcaatggtaagacagtcccgaaccgattacgacgcatctactcacaaagagcttcctttctcgtagctatcagcgtccactcatttcgcgtccacccctgtacaacctccaactgtatctcacaacacccgaacgatatgaatcattccaacgtccataactcgccgacgctcagagtccgttccggacgagccgacggcgttccggtctggatgctggttgccgttctgataaataccagaatggcccgatttccaagctccgactggggtttcaacatcgaggtcgactcgcgtgtgggtccatgggaggcgatcgttcaccatgatgcagttcgaaaaacaagccagagacgattgtcgggcatttgacagatcggaccagccgtagggtattgcgtcggaaccgccgaagccgtcggaacgatccgtcggaaccctcgcagcgtcccgtcgggtgcaaagtcaaacgagccgacgattcgtcatcgaatacgtttcatgtggcgaaatgtatgagatgtcgctttcattggcgatcgaccagatccggcggcccacgcacggatgtcaaaggccccggataatcaacaagactggtggcttttacaagtcgatagaaggacatataatcttgctcaagaatatgtgcttcctcacggcgaggagcgagtgtataagctcgttccacacaaggcatcgccaatcatcgttcacaagaggcccggctcgtccaatttcaaaagatgctacttgcgcgaaaagtctctgcgctctcgagcgccgtcggggtcatggtgatgcatggcgcgtcgaaagtcgccgccaacgactggaatacgtcgtacatcaaccccgtcatgcccggttggcactctgacccgagctgcattttcgtcccgcaattggacaataccaccttttgcaccacgtcctcgtttctcgagtttcctggatgcaccatctacgccagcaaggacctcgtcaactggcgagtagccagcaacgcctttaatcgtcaggaacaagtccctggcgcgttgaccgccaacatcgggagcaatctggagactggcatcttggcgtccactcttcgctaccacgacgataaattccacctcatcactacctggctggactcgtttggcggacaaacccggatcgagttgcgcatgtttatcgggacggatccatacgacgagaagacgtggggcgattccatcctgatacccaacattggcgcggctatcgatcccgacgttttctgggaggaagatggtcgaatggtcgtcaccgtcggagcttccgtgattgccgagaacggacctattcaagcctactacgtcgaactcgatggtaccacggctcggaatacaagcgaggtgatcgaattgtgggcaggcaccggagggtcctatccggaaggccctcatttgtaccgaaaggatgggtactactacctcttgatcgctgatggtggtaccggcttgccccatactgtcagcatggcacgatccaagacgttgcaaggaccctgggagggcaaccctgccaacccagtcttgaccaactacaataccccggagtactaccagactgtcggacatgccgacttgttccaggacgccgagtcgaactggtgggggatgggtcacgccacccgtggaggtcccgatctgtacagagcaggcatcttccctcttgcgcgcgaggccgtcttgttccccgtctcctggcccgaaggcgaattcccgactgccaaaccggttcgaggctacatgcaaggacctttgcctctgcccactctttaagtccgaggacagggcgaattcgtcgacgtgtccgaggcggtcgactttttgcccggttctgaattgcccaggaactggaaatatgtacgcgctccccgtcgacctgaaaatttcactgtctcgcctgacgggcactttggctcgctcaggttgaccgcatctgccagtaatattactggctcacctacggtcaacgctaccatggggctcaccctgatcactcgccttcagacgtcgacgctgttcgacttttcgttcgacatcgctcaagactttagcgataccgagggcgacgaggctggcatgacagtgctcaagtataacgatcagcacgtcgatatgggaatcgtcaacatgaaaaacgagggggatgatgccaaggttggcaaattcattcgcgtccgagccaccgccatcgacctcgtcaacgcgaccatcccagagcccgtcatcctgcccgtcccggaacgttgggccaacgacttgatccgtatgcgtctgtccgctgtcagcccgacccatttcgaattctcggcgggaccggcatcgcggccgaaagaggcgcgctccttgctcgtctttagttcggagctggtcaccggaagtggaatcgattcgggtaagtaggggtggtgtattgcgaggctgctttaacgtttgactcacccttcgtaccattttcaggtcatcttatgggagcttatgctactaccaacgggttagagcgcgagatgaacgcttatatcagtcggtggcggtacgaggccatcgggcagcagatcgactacaagacgatatgctactacgaagccgatgggtacaagaattgcaagacgaccgagtgatcccgcaaggcgatgtttcagcgactcgagcacggaggttgtctgcggtgttctgattcgggtctgtacaggcagcgtacgacgagacggtagcagaagacgggtgtaggcatgattagacatattgccgatgttcccaatcaacccgagtctgtaacaatcaagcagatattacttctgctgtcccaccgatctgaaattgccatcgacatccatcttgtatctgaatcatcatctcatgttctccgaaccgcgatttcctttatttccctcgcgagattcgtcatctttcgacggtttgaattcgacaggaccgacttagcgtcagctgtgctctcttagataaaccctacacatcgcatctatcgcccatgtttcctcgctactagttactgggtcgatgtgatactcggaagaggtctttttcaagctagtgatatttgagctgctgccgcccatcagacctcagtcgaacatggaaaagtcaatgccccgtaacgatggaaacctgagcatgaggaccccctcgggggacaagccgttcgacccagtcatgtctaggtgagtctcgcttgcgagaagttcaggcggaactcgcacgctgcgagctaagaatgccatcatctcggtcttggcaggctgttcgaaatgtttagcaacgtctggtcaccggaaaacgaggccgggatcgtcaacctcggcgtggctgaaaactcgttgatggtgagcggccgttcatggaaggatcgaacctcgacagagttctgaccccccgtcatcgctgtgctgccgtaggccgaagaactggtcgagttctacaggaccaagttggcggagacgttcaacagtaccgggttaacatatggggacaacctgtacgccagcaagcggacgaccctggcgctatcacaattcatgaatcggtgagtggggaacctctcgtgtcatcttcagcgtgtccgtatgaatgatctcggtttgcgacttgacagccacttcaaaccgcacctccccatcgaggtgggtcacatcgtcaacggcaacggtgtctactcgctcatgaaccacctcatgcatgtcctcctcgacccgggtgaaggaatcatcctctccagtccctattaccttggattcgacaccatgtgtacgaaacgggtcgacggcgttttggtcggcgtcgagttggacgatctggtcaacgcgtcagcgctggaccaagaagggttagtcgacgagacgatcaagaggttcgaggcgaggctgcaagagtctgaacggatcggggtcaaggtcggtcggtctcctacgtccgtctcgcgtcgcgccatgtaattcatcgttcttctctacatactgggtcgcaggtcaaggtactgcttttgaccaacccggggaacccggtcggaaccgctcgttcgtcctcaaccgacttggatcagagccgcgaagcgtccgactgatgaatatcttaaccgacctcgacagtgtcacgggaaatgctcctcgcctacgctctgtttgcagagaaacatgacctccatctggtatcggacgaggtgtacgcgttgagcgtgttcgataatgacagtgggtagacgacaaggccggtggggattgtcatcggtccgatcgattgaggctggccttattttgcagggatcccgaatgcgttgccgttcacgagcatgctgaacattgatctcgagcgggagctcggcaagtcgttcaacaaaaagagagtgcatgtgagtccgatcgtggtcgaggtgatgaagacgaccaggacgatactgattcccctacctggaccaggtgattcatgggacgagcaaagacttttgttccaacggtctaaggtgggtcgtttcgattccggtcgatcgtgatcgcccactcatgcaacccacacctgacgctaggttcgcgacgctggtgtcgcagtacaataccgagctacaccgggccatggcctcgttcggcctctttatcaaacccagctcggttagcgatactctgctttacgccctgcttacgacaccggcaccgacggggaacgacgaaatggggtcgtttggctgttacgccgactggttcatccgagcgaatcagctcaagatgagggatgcctatcgatacatgcgagatcgactcgaagccgtaggcctcgaagtggttccttcgaacgcggggcactttatatggacccggttaccggacacgtccggttgggctagctgggatgacgagttgagagagtttggcaagattttcgatggaggcgtctacatcgtgagtcgtcgttgtggatgtcccgtcattgtaaagaaaggcagacaaggccgaccggggtgctgattgattatcgatcaccctgtgctaggccccgggatccctatttcatgccgctcgtccgggtcatttgagattcacgttcacggtgccagcatcgttgagcaagctcgggctcgatcgtttcgaggcggttcatctatctcggagctaggcgtggaaggaaaagaaagtcgggggaaagggtccgctgacaagatccggcacgacgggaatgaatgattattctgaaagggggaccaccttgtttattcgattgcaagctggtcctacgacggttccatcttgttgacatgcccattgatcgtacgatggttggcatgttgtgacacgggagacggcgttgcgggatcgcaagaacacgacgacgggtcgaattgcaggtcccagtcgtcgaggcgcggcccggcgttgtccgaactgcgcccgcctcgatcgattgattgcacgatcgaccgatctcaacatccgactcggtgtctctctctctctctctctccggtcaactatctcgctctgatgagctgggacccccagggctgatctgaacgttcggtcccgtcctgtcccgatgcccgagtcgttgcgagcgtacgttgttggcaggtcattgttgttgttgaattgttgatgtcgtttgttgttgttgttgttgttgttgtttttgttgtttcggatatttccccgaaagaaatctaattccgtcgtgcctggatatcgccaacagatcacaacacacaagtgtagtcaccctcgaccccaccccatctaaccgcacgatgtcgactgcccccccgtcggggagacggaagcaaaattgcatccaaagctcggttcagctccatcaactcacacgtacgggggaggaggcagagggggggggaagggttgcaaggtagaggagagtagagaactaggggggtaatgacgagcatgcaaggtaggtagttgtcaaacatggtacaagtgagcaatcgactcgtcataccatctcgctgcgtgtccaggttgatacacttcgaccactcaccgctcggtcgaaccccgaacctctcgagacacgccggtgccggtcacgcatctaccccaggtcgcgctcggtagatctttgcgacgacttgaccccggtcaaaagaccgacgattctggccatgtcagaacaaggcgccaggatggaagtcggaggagccgtcgtcaagaaacgtaaagcttcggatgcgtcaatccagcacaccctttcgcacccgctaggaggaggatctcagttcggatacgtccccaacccggcgacgggcacgacgacgccgttgcaacctccccggcaaaagtcgaccaagaaacgcaagatcaaggaagctagcgaggccgctctcgcgctcaaagagaggtcgacgagggatttcacgccgaccgatgatgaactgggtgatgatgacggggacgacgatgagatgggcaacgggcgtgggtccatctcgggacacaagctcagcgaggcgtatcgacgacttcagtcgagaagggacgagtccaaggaggctagcgaggccgagggtagccaaagcgggagcaagaagaacaagcggaatagagtgcacttcagttgtgtagaggtgggtcgaggtcgtcagcctttgcatgagcatcccggttgacgaattttactcaactttttgcacagtgtcatcggtgagcctgacgcacctgggctgcaatgaccgcagtaccctactgacgcatacccttctgaccgagttgctgcagacgcaaacaaaaggtgtgccgcttgagccggactcttcggcaagctctatgctaattgtccttcttgtcgtcattattgaaagtgtgatcgcaacgaggtaagccgtccgtctggggtttagagacccgtgtagcgtctctgttaacctcctcgcgtctgttccttctcagccttgtggtcaatgtatcgctcgaaaggttcccaacctatgtcggcccttcatcaatggtgttgaagacccaacgatgtaggccatgaaagaactcctatcgtttctgcggtcgcgtactgaccgttctccatcccgtcagctacgactcggacatcaaagcacggctcacccggatcgaggatatccttgcgaccctgatcacccgattgccgacgccggcacctccggaagagacgcaagattcgcatgcccaggcgtcaacgtcgcgtcaggcggctcgtaccgtgtcaagtcctcgaccgatcgcacccgctcctccaggcatcaccggttcgggtcgcaacaggatcagaggtcatcaccttgtccgtcgtgggtcgtctgcttccgccgatctcggaggttccaccagccacgccgcactgcagctggatcatcagcatagacaacagacgggtcagggtgtccatggatctgggttcgatgtccgtgcaacgttgggcacgggaatggagggtatcatgcagaataacggaggcgaagaggtctttcatccgaaggggtcgggactgtcgacaatcgggtatcctacctaccaggttagtccggagacgatcgaatagcgattatcgggtacgggctgaataccttgtctcgtcatgcagggtccaggctcaggagacacccaacataccccaccggtacccttgtacttttcagctctacattctcatccttcgccgacagaccacccatcgcctcattcgggatcaggatccgttgtggtacccggcctaggcaggattcgcatcactctcgagcctgcctcgcccgaactgaacgatatcctccagacgctcagcgagtcgggaatcacaaaaggtgttctcattggactcctcatggatctgccagacaaggcgctgagtgatattctcgttgagtaagcaatccgcgggtcgtccagtcgatgagagtcacttacatctcaacattgcgatttctctagactgtatttccgggaaatcgagtaggtgacgcacggcagtgagcgtgtcgcgacatcggctgattgcaatctcgttcaccgcagctggactcggtacaagatgaaccgccccttgttcatgcgtcgatatactatattcttcgagtcgattcggcagaatcccagtaacccccacatcgatgctgataccctcaaatggctgccgttgatgtacataactgtgagttccgtgccacgtgcttaacgagacccgatcacacaatctcattataaggatgtgtatcgtgttgtagcttgccattgcaacgttatcagcccccgtcgaaatggtcggcggaccgctcggacagaaatcgtggagtcgacggttctacggaagctcccgtaggtcggccatgttggcagtcgagggacgagtcaatccaaactgacttgatccattgggctgtaggttccgctttgacgtgtgcgaaagccctgcagagagacaacctggatatcgtctatgccagtctgttgtctgcccgcttcatgtgagccgtgtcatttttgccggattgttcctcagctcaccgccctgacttataggtttctgacacggcgagctgccgagggttcgacccccttgacctcggccttccagctcggtctatatcgagatggatctgtcctaaacctgatggacaagcgcgaagtggagctgcgcagacgcgcttgggctatggtttatcatctggatcggtacgtcgagtgccgacgaaaggaactcgtttgttgatgactgatcccctgggttgcttcagaacgaatgccctccttgtcggacggcctacatccatctctgatgcgcacacggataccaaagagccagccaatctcgatgacgaagagctggaatcacctgactttgacccgcgaggacattctcttatcaagcctacggaatacacccaagtcatcctccgacatcgtctcgctcaaatcatgggtcgtatctcggatcatagtcagtcgcctatcgttgacctattcggccaagacgtagctgatccttgaaatgttagcctttgcgatcaaaccccctgattactcgatggtcctcaagctggatcaggagttgctcgattggcagagcaaattgcctcccttctttgccctgttccacccggacacgtcgctcgatcaaaagtaccgttatatcttcgttcaacgacacctgttggcttgcgaatttctctttgcgcgaataactcttcacaggttggtgtttctgtccggttccgttgatccgcgctaaagaggtctccgttaacgttgacaggccctacctgctacgtaaacgggatgtcaacaaccaataccggtactctcgggaagcggctatcgaatcagccaaagcggacttgctgggtaggcgcgctttcatgtttgagaaaccagaagataccaaagtgaacagtggaggataccgagtgtgagcaccgccgcttcaccgattaccctaaaccttcaccgacgtctgtcccatcatttcagactcaattcttacatcgtccttggagtcgctatcaagagtgggttgatgcaacgctgaggcctggatcccaagccctactgacgccgtactcctttctccccagtggaacccaattcacccagagcggaagaattacgccgcttgctggacgtcgttgcaggcttagcgccggatgagcttggcagaatatccgagccaatcgtaaaagacgagcttgcgattgtggagttcctgactcagagggcaaacgatcctaacaatagcgagggcgctctcaacaattccgctccaataccgccgtaccatatcttgtctggcgaacagcggccagctctactcgaaagaagagacacctcggcgtcaaggcagtccaacgaagttgcagcgttccgtcaacagcacgctagcgacgatccagcttggtcttttgtcgcccccggcatggctacgctggatgtgcacgcgcctttctcgccgggaggtgtagccaacaaagcaggctcggacgtctccacgtccagtgtgcccggcccgctgagacccccgccacctcggggctaccacggacagtccgcctcctcggtatttgcagatcgagaaaataacttcttccaacaatcgcagaacgcttctccagctcgatcacaggttcaacaatcgccctaccagagcagcaatctcgcgctacagggactctctcagaccatccacgatcagagttacagtcacgaccaacaaggcatcacgggcgacttcaacgtcgactcgagtgtcatgcccaacctggactcatggtggaatgatatcgggggtaacctggctataaatcaaaataccccaggcaatttcaatcctttcgctctggcccaattcgggcaagtggaagaaggggccgactcaaagtgagcatccaggtatcgattgcattatcagctcactgctgagacataggcaaatcatagcgaaactgccttcttgaacatgctattgtcgaccatcgcaaacagcagtggcccgggtagctctttgtaatgtgttggatgattggggcgtaccactcgacatgaatgccgattagtggtcatcagcgctttccctcgccattcattcactgttgcacacaaacatccctaatttccttgcccagacgactgtccttgaatcgcctgagcccttcgaccaactctcgatccgcagcaggcaacgtttcttcaaatcccgcatcttgttctcgagaggtacgggcaatggcttcgagttcgtcggccgtgatcaacggctgcgaatatcctggttcgtcgctggggtgggcggtcatgtcttctgcggtcggcggttccgggctattggtccgtattttcttgcgcctgtcttgcgagtctgcttgtttctcgaggacgtcaagcttccgtttgatcacagatgtgaacggatgattggccgaggatgggtcgactgcgcatacagagcgacatcagtcgttaaagaggtgtctatatgaatctgcaaagcttaccatgcaggagtccgaaggggaagacgtcattgctccggtcggcagccggtgtcttgtacttgccctgacgaagcggcacggttggcatttcggaaactacatccgctcgacctgttgcggcctcatactcacaactccttcgcgacggtcgacccccttgataatgaatctcccttgatcatcgatcttggcttccgcaccggggaacgtcatttttgtcaggttgatcaattcgagtgggtttaacagacgcgtagtactctgctgtgcgatggttcctttcgctgctttgagccgacaaccagatcgatgccaaattagtacggtgacgattcgaattccagtcacgctttccttacctttcggccttttgcctctcaagggaggctgctctttgcgattgtttgctgtatctgcatctttcgtcttcactcggggagaggtcggttctgaagatgcgactcggatcgtgggttcttgggcttccagggctagatcggaagaacttttaggagaccgagatcctcgattctcagcttctgtttcggagccgaatcgtgcgatgtatgatgcatagagttctgtttgtgatattgatggcttgcgggtggaatgagaatccgagacgttgtctgaaacacccatttgagccgctcggtagttatgcattagcctagcgatcgggagagaaggcacgtttattaaagaccgagggtagcaggtgcttaacggctctcaccaggtactggctctgagaggctctggcatgcctacaaggtactcttccagcccgaatatattgcgtgactgcgttccacggacatccgatgcatgcccgtcgtcttcttcgaccgggctttctgccttctctccaagaccccgcatgatccattcaccctcctcgtctcgggccagactgcaatttccgaatgtagcacaggccagccgaatcagatcttgcccgccgaggagaggtgacaccttgtgatagggatcaaaacgcgattgataggccaggtaaacgtccaattgagacactgtggcagtagctacaggtcgatatgacatctgtagcctgtagaatatgttttgagtgtcacggacatgtctgcgatggtaaacttcgcttcgctcgtaccagctcgtcgctcggtctggctcttccatgtcgtcaagtccggcttcatgcagtcctctcaatttgttccttcgttgacggaaatattctttgactttgctccaatgccttccggtcatgtcggccagttcgatgatttgagatttcgaaggcgtcgggttttcaagataaaagtggcgaagtatcgcgagttgctctttgttcgagtacttggcagatgtgcccgtagttttcgcggactgagcgacagactgttgagtaggagtggatgaaccgcatgtggtcacttggtccccatctggatcagccgccgtgggcatttgactcccctcgccaactttgcgcttcgatacgagctgatgaccaccgtttatgctggcctgttccttcgtagttgcctcgtttgcggtggatggtccagcgcgcgtacttcggctcatcctatcgtcctcgtcaacttcatcgtcgtccatatgttgcgtttgaatgctgggatctatcatgagatcggcgctccgccctgccaccgtgtctgctgcatagccctcgagctcgtgaacctctggcagatgatgaaaggctcgttcaaacaactgatcttctgcagtcccaactgcttcgtcttgttgatcctcattcggatcatgctcctcttgtgtgaacggggatgacatcttgacgcgattcagctcgtctgtttcagtgcatcacgatgtgaaacctgacgttgagctcgggccctgtctgtgagtggatgaggatcagaaaagagtgcatggttcccagggtccaggaggaaaagtaccactaacggtgatgattcacggacatggtgaggttactcttctgggataaaatatggaaatgtccgctctgatctatattattgcgattcatactggggacccgttcctccacaaaccaaacaaagctctcctcgagctatatccaaagatccccttgattcttgcatgaacataggctcgatatatggtcattactctacactcatgcattgaatttgcggctcgtaaatctctgatctacattctataaatccgcgtcaaagggccttctattcacgatatgcctaccgggacctcattttacgctcaggagctcgaacgagctctgcaggagaacgcttttgccatcaagagctcaaaggtcttgtcgcaaaccggatctgtccaagcagctgccagcataacccttctcgaggaccaggagatcatagtccagttgaacaatgatggatttcgagtcagtccaaaatcgtgacgctctgagttcgtaaaggaagactaatgattttgtacaatcgtgtcagttgcaaggccagagcaagctgtacgatacgctcgactcgctactcctgaacaactctcccaagagtatggaaatggtctcctcgaccctcacgtcgagacttgaggggctcatcgccagcaaagagtcgaattctagaatagaagacgagatggcccctgaagcaataagcggcgatgagccagcagaaggaaacgagcgaaagcaagcccagggttgatatcgaatctgttcatctcgttgataactctcatatagatcagctcacggtatctagcaagctgactcgcacatctcggtcggttcggatagatatctcaccgcccaccacggggacactcgtctccccccatgacccgctctcatcagagcgacaaccagtgaccaatgcgaccttgacaatccgttgcattaagagttttgagtatcggacagagaagaatctggttttgaaggggctggacttgaccaaacttacggctcgtcaactcatcgagatgtgcaagcaaggcaagtgcatgatagtgttgttgccggagcgacactgttgacgttcgtcatgacgaacgaatttctgtagccatgaagacgacgccgggattcaagccatacaagaccgtcaagttcggtaagccacgcctagggaatccagtggattgtcactgctcggtgctcatggcttcccgcggtaaaatacaaacaaacagacaccttgaagctctacaatcaagcacattctcacaaggtaaccatgtcgtccttctttatgtggttcgaacccagctcactgctctgtctgtatctcagacaatgaacttgattatcaacttggataacgacgagtggatcttgacagacatggatcggacgatggaacagtacggcgcctgtgagtggcttctgccaagatgctcctttttacggaactcacgatataccccttctcgcaaaaagtgaatgagaccgagtactcattgttcagtcaggaggcatacgacgcgttcaaggcgaatcccacggtacaaccatctcgtcttccagcatatcgaacatggagatggactaaccaatctgtttgacctgatagatccggtgggattgaggtgccattgagcaattgttgtgtggttcgaattgaaggggttatgactgaattgtatgacccgatcgtttacgtattcgagaatcagtcgtaatctcggaagcaaatttagttgcctgcgagtcgctcacagcagccgaccccgcccggggtagatctacacttcgtacactttagtctgctttcccaaaatggtcaactcgctcatcgcggttcgattccttgacagaagcctagaagctcctagctttcacctagatattcaagtagatttcaccaggcatttctgatcccgaacatctcgcaagtaactcgttaccggtcatcgaacatgaacccggatggatcttgttcccatctctatgagataggggaaaaggatcgagacgcaatcatgaagcgatataggaaggtgatgggatgggccgtcagcgtagacatgagaacggatgcgtatatccgcgatggtcatcttgtgagctacaaaatgcttaggtgttccctataccgacgtcgccgaaggcccacatagacgatacattacggctcgctgaccggcgaaagcgcatctgtgtcagacgccgtttccttcatgcggtctctgtcatcacgccgtcaccagaccctcggcatgtcttcagtgcgagcatggtcagacattctgcagggggtcgacaaagtcctcgtcatcgcgggacagacggaagttggccaatcgaggtcgcgattgcctcggacggcatttcgagaccttcggacatagtctaggtgagcaagcgctagggcgcgacttggacacatcatctgatcataccagcaatacagcggtcgatactgcgactggatcagtatggtgctctgcatgtcaagactgggtctatgctttagctttcgagagcgctctaggtcgattgcgacgcatacaagaagaacggctagatcacagtgtcggtatgtcggaccgcctccctggcaactttcgaagtcggttgctgaactttcaccccgccatacgtaggtgatgatgctgcagcgctgcagagatcaaagtacaaggtcgtaaagcctatcgaccaacctttacccagtgacctgggattcgttccgattcgatgtcatggtccgtttttcagaatctaggttcggatgaaacacatcgctcataccgttgtcggaccggcgtcagctgtcaaaccacttctcaacttgtctcaaacatgctttctatcggcaatcctccaagctctcctgcataaccccctttggaaacagtactacctttcttcgggtcatgaccggaaaagctgcgctctacgccgggctaaaggcttgctgcatggagaaaccaagtatcagcccatggagggtactaccgagggagctcgacttggggcagaagagaatggtcctggtggtctcgccgcggtcagaatgagcgacctcgggctgggattaggggactgtatgaattgcgagatggacggcgctttcgcggaggtgagtggcctcactcactctgcgcaatccagtctgtactgatgaagttccatcgggtttccaggcctatgggggcgatacgactcccttcgggcctataacgatcctttttgctatgtggaaggcgaatactgaacttgctggatacgctcaacaaggtacatccaaaagactgacatctacattccgtccatgagatcccaatcctttcctttggcagatgcccacgcgtttttcctggctactctcaaccagattcatgtgcacgacccgaactgcgtcgaatcgcctagcacctgctcctgtatcgcccgtaaggaccgcttcgtgcgagcgaggccagagcctacataggtcgtttctgatgcttgttcagctacccagatcgtagtttcggcgggtccttactgtccactgtgacctgctcacgctgtggtagcatgacagagaccgaggacccgatcttggatatcagtcttgagctcaagaggaatacgccagatcccgatcgatcaccagtcagcggacgacatgcaccaacaactgatttaattctggcagactgcctcagaacgtgagttgagccttcccgagagtcattgctgaatccgtgtgcacaccgcggctcatcgagctgagaattccagcttcaccgcaaaagagtctctgagagacaacgtctacgcctgtgaaaaatgcaaacgtgaaggcgaactggcagtaagactgcgatcatctccaccgccagtgagtagccattgactatccgcgcgaataggacgtctccaagcaactctccttcaaaacactgccagccaccttggctgttcaattcaaggtagagtccagatctggtgaaagcaacctctctgatgctgatctcggacacagcggttcgagcatgtcagcaaccacctcgtcaaagtggacacgatggtcaaatttccaaccgagcttgatatgagaccatacatgacagactatctgagagggtatgcagcgtcctgctgatgggtgtcaacgcagctgattgtcaggtctcccacacagaaacgcgttcgatctgccgtccgagatgttccgctatcaattggtctcggttgtgactcacgaaggtaaactcgacaacggccattattgggcgtgtgtcaattccggtcacgagtggtttcaaatggatgacgagaaaggtcagtttgccacaactacgagcgaacccaacgagacaagagccgtcggtattaattatgatgttcgaacggatggaagcagtctcatctatttccttgtctagggttctcgcagagaaagcatacatgcttttctacgtgaaaagttcgatcgcctttaatggacgagcgcccccgtaatgtcgtcgcttcccttggacccaatcatcgcgaccatcgtctggcgacatatcgtttggaagcgataacgacagacagtacacctgcaaatagacaagctcgtaatgtccagtaaaacgcatccttgtaacactcccgtccagcagtacctatgggacttcgctaagctagctgaacgaaactggggccgccacatgcttacagacgcgatgacccatcgaggcggtagtctgtcacaagtggaagaacgtcttaccggccgtgtagactttggaggttatatagggtggaactgaccgtatgagaatcgtagatccggccaaacagtaggttacccagattacccccaatggcgggagcaaccgccacaattccccagttctagactcacatagatcagctatggttgggtcagctactcatatattgcttaccgcggcaaaattgacgactccaaatgtctcgaggacgaccatgggtagaagcgagaagatgcagccataggcgaaacccaatgtcaaggatgttcgccatagaattgttacggtatcagcgtgctgcgcaagcagctgagagcaagcgaaaagtataccaatcgggatcaggaataccttctgctcggacgttaagacatcagcactgcccaaatctgtgactacagccaacgaatccaaataaattcaaagaagtttctctacttacccttggcaattggaacgagttctggaaataatccccaatacatcctgaatacccagttcaatacatctgcaggatgcgaaggtttattaacgagtcaactcacccatcaccaaacgcccgagacaattccagatagaaatgattgagacctgcaaggcttgactttgcgagaccgtcccgacgtcgttcttttctccaggacgatctccctcccgccagagagtcgacacgatggtaccgatgttgttgatgtacaccaatccagtcccggccactaagcgagtttgtcatgacgttgattcatgcacaaaatcagcagtgtgtgacttacgtagcgccaatgaagcaaatagcagccagaagtcggattctcttagcagctctttcccatttatgttgggactgtgtatatgtggcagctgagcatgcttgtatggagtcaacaggaactgctcagttcgcacattttaagactcacattgtaccggctgaggtttcagtcgacctgattcgctctgcttgcccatctgcgcataaaatgtgatccagtgaccgtccacgtacagcttgaatttgtccctgcaatatcggcattcgaattcagccggatacccttccggaagaggagatccaaaccaagctgagatgagcagcattgctcactgaggcgaaagattcatttgagtggctatctcgccgttctgcgccgttttcgatctcgtcagccgcaacttgttgatagtctcctggaccgatatgctccctttcgttgaatatcgtgtccgatcgtaataccagagagccaaggcccataggtagacttgttccaatggccagcatggcaagaaacgctgaaacgctaccttggcatatactgcgaaataaagaagcgaataggaaggctgagagaccgtaacctgctatacagacagaggtagcactagccctctacgtccggtatcagtgtagtctggtggcgggctgcgcttctcacttaccgtatttttcggaaagctcctggctacacttgtcagaccgctcatcaatcccgcggtcgctccaaggcctgtgatgcccatggaacagacagcaatgatgagcccgacaaaatttagcgagccgctatgggttttagcttgattgtcgattgtgaaaggccccggatataggtgcatggcggacatgcagccgtaccctgagacgctaagaaccgcagctgcaagtaaaggactaaaattccgacacaactatcttcgatcaaatggcatgtacaatgacgtgcccagaattcttgctgcctcacaatcgtggcccttgcgaatcaagaaggcgaccccatctaagttgcacagagaatgccatcaatcggtcggacctggattgttttcgcactgttcgacctacagcggaccgctcaaatagacgcctatgtttccagacatgccgataaggttgagtttggttgaagatatgtgtaacctctcgccaaattgaggcgcatatactgagggttgtaccggagatttaagcagcccataccgcttgagccgtgtccaccaactaaatcttactcgaaaatacctatcgatttggttattcagtgtgaagttcgacttgtctcagtacgttctccgcgtcaaggaacaactgtggattactcgtacatagttcgagccactgagtaagcaggaccttaggtcagctgtcaagagggaggacgaatgatcttcgtttcttactgacctcgctagagctacaagggtggccacaactaataccaggctcctagacagttgtttagatgccattgttgcgatccggctcagattgtatggtacagtccgtccgtctcgattccagatccccgaaccgggattcccaggcgccacgctgttgacgatctttatgagactgggtttaaatgcagaggtccattggctggcaatcccttgtctagcgacgccttatcttgatcgacagtacagtaactaaacagcagctcagctgtatgtctattgtaacacgggcatagacgtctagtatttgcagatctggcgattcgattatcactctgacctgatctgtcacgatgctatctatcaccgagagtggctgtccccggggatggccgtaccgggggggggggaggggtcagagtagcttgataagtcttccgattgaagttgacgcgcaacggcaagcttatgtgtcatttccgatttccgacccgcccatccgatcgatcggcaaccatgcgatttacaggtagcagagatgaatactactactgtggtggcagctggcagctggtagaaagttcacaattcgagtagatcgcatctcatctcgattacgggaagaattacagtattcctcggctttctatacgcactgccaaataaaaaatcctcataacctaatcaaaacgccgcagagtcgagtacccgcctgccggaataacgccaaaggtcacgatcggattcccagatcgatacgttttgacagacatcaaatatgcgggagctcgaatcccacagtactagggcagattgctctttcagctcagctttacagcaagctttcgatccgactagaagagatcttttggccgatgaattcaatggcaagctgagaggtcaatcgcccagacttacgagggcttttgccgagggacggctggtcgccgcttatatggaaccggtgcaatctctgcaagcaggagggcaatattggcagatgtgagatatagttctgtccagacgctgactcagctagatgacgaagactaaatcaattgtgtctaaggctcaatgaagtaaccccagaacctcctgccttgttgttggacaccttgccgcgcacacatcaggcggtacctgtcacccaaggtcttgacaactgcatcatcggctggaaggaggtcatcgccaccgcccctgctctgtccgcttcagtatctgcatccttgcagcgccagccaaccattcaaactggtatatctggctcctccaagcagtccgttggatctggacctcgaagcggggcccttgggatgacttttgtgcgggggaaaggaagctatatgccgttccggcctggaggacttgacgagacacctcctcctgcctcgagtgctgatgccgatcatgaaactcaagacgaggcggattcgcggttgaatactcaggcatcaagctctggatggcgaacggtcgctcgtggccttgggagaggcctgaattttgaagtcgagaactcaggcagtgcaacaaggacttccgcagctgatgagcttctacgacggatcttcggtaatgccaacctaaatgccatacctaaaaggcaagatatggcacagagtaagggtgaacctatcggttcaaagacgaagatcggccagagcaaggattcagctctgtcagattcggtcagtcagacgaatatatgatatacgcatattttactgagatcaccaagaaatagatcgatcgccttcatcagaagctcaacaggtccgaggcccaaaatatagacgatctccttcccattgctgtcagtctgccttcatatgatctgatttcctctccgctcattgttcgaggataacgcagagtctgcccgcgcccccggtcgcgaatcgctctgccaaacgcaaacgggaatgggcgcacgttatcgatgtcaaccgagagttgacgaacgtacgtctggtggccttttggagtacgcaccccacgtgcttagccgtatacgattcagtttacagatctcgttccagaaatggctcataaggtgagcttttcgccaagcaacccgaagagtctaaactagcgatctcaccatatcaaacagtactctttcgaactagataccttccagaaggaagctgtctatcatcttgagatgggagactcagtctttgtcgccgcccacacatcggcgggaaagacagttgtcgcagaatacgcgatttctttggcgatgaagcacatgacgaggtaaggtgactttccttgcgctctctcgacaaaacactgagacagtaagagactgcagggcaatttatacctcaccaatcaaagctctttccaaccagaaatttagagatttcaaaactacgtttggctcagacaatgttgggattctgacgggtgacgtgcaaatcaatgcggaagctagttgcttgatagtcagtgcagtttagctcattgcccactcgcaaatgctgatgccggaagcgcttgaagatgacgacggagatcttgcgcagcatgttgtatcgtggagcggatctgatcagagacttggaatttgtgattttcgacgaggtccattacgtcaatgatgccgaggtcagtgaagcgtcaggcggaacgtgctctggacaacacttatgccattggtcttgatcagcgaggggtagtgtgggaagaggtcatcatcatgttaccagagcacgtgaacatcatcctcttgtcggccacagttccgaatacgcttgaattcgcgagttgggtcgggtgagttaatgcttaactctgaagagcgacatcatgctgacgattttgaagcagtcgcacgaagaagaaggacatttacgttatttccaccgcaaaacggcctgtcccattgcgtcatcatttatgggctggcaaggagttgcacactatcgtcgatgaacaaggccgttttctttcagaggggtcagtctatcttgacgggcgacgtggacgactcggttacttacgaaagttgcgcgtcagttacaaggctgcgaatgaatcgatcagacgcaagcaagacaaggagagagaagctgcaggcctaccagtcttgcaaagaacaggcggtccgaatacacgcggtagtagaggcagaggcacgagtcaatccaatacatccactcgaggcgggagcgcagcaaacgctgcttcgcgcgggagtgcaggaacagtatcttacggcgcaaaagcctttggaggcgccggagctttcgataagaatgtctggattcaccttgttcagtaccttcgcaaggcggaattgctgcctgttgtcgttttcacgtttagcaaaaaacgatgtgaagacaacgcgagtagccttagcggtcaggatctatgttcggctagtgaaaagagcgaaatccacgtgacgatagaaaaggctctcgctcgactcacaggtaagaagctaagtcattctttgctgctggaagaaagcgactgacttcacactacttgctcacttcaggttctgataaacggctacctcaaatcctccgtatgcgcgaccttctttcgcgcggtctcggtgtgcatcatggtggattgctgccgattgtgaaaggtcagcggtcccgcacgcgcgggatagtaacgtgctgacagcttgcaccacctcagaggtagttgaattactatttcagaaaggcttggtgaaagtcctcttcgccaccgaaacattcgccatggtacgccgtcatattatacgcttgtcttcccagtcctcattctcaaaattttccagggtgtcaatatgcctgcgaaatgcgtcgtattttctggaatacggaaacatgatggacaaagcttccgtacgaacatttcatacatcgagaagatttgccactgctgacctgatttatgtcacttcaggaactctcttgcccggggaatatacgcagatggctggaagagctggacgtcgcggacttgatgtgaacggaactgtcatcatcataggtggcaccgaattgccggaccaagtcactctcaaggacatgatgctcggcaagccgagcaagctgatctcccagttccgtcttacctacaacatgatcctcaatctcttgcgagtggaagctttgagagtggaggagatgattaagaggagcttctccgagaatgcggctcaaagcctggccccagagcaacaagcgagtatagctgtagtaagtgatggccattgtccgtatatgctggagatgacttaaagcatgtcggttcaggctgaaagaaaattagcagccttgccggctttgagttgcgaaaactgcagtcaagacatcgatacatactatttgctcgctgaagaaatccttcgactggatcaggaagcgatacgatccgctgcctgtcatctacaaggatccaagacgtttagcccaggacgcgtggtcgctatccatagcggaacttctggttgtacccttgccttgctcttgagaccgacagcaaactggcgcgccgctgcgcatggacaacgaacagacagcgaccgcgctttctgggttctcgttccctcgacttaccagaccgcagaagaagaaggtgcgattcgcttccttaactgcctcaaagagctggaccaatatgtttacacccctactttagcgttcatgcctccttcttggccactgaagacagcagatgcgccatctcgggatgtcgattgccagatcatagatatcgacgtcggcagaatcacaatggttgtgaatcgagcgatgtcaaaggtaggcctggcgaccattcgtggaatcctctcaaacagactgacacgtaattacttagattgatgtgaccgccatcctcgataaagccgagcctgccgccattcaaaatgctcgagagtggcttctggaaacatgggatacacttgcgggctcttgcacgctgccagaggtggactggtcgcggatgcggtctcatctcgattttcaagagacgctccgtcgacgagactcgcttgctcctcggcttgatgctttacattgtcgtgcatgcgattcattccagtcacatgtaagctcgcacaggatcaaggccatgttcaggcagactggggctttaatcaacaccgctcctcgagtacagttgcaatcactgcaccgcacgaagcaacttgaagctgaattgcaagatctgaagatggcgctgtctgatcaaaacctcgaattattgcctgattacgagcaaaggacagctgttttgaaggagctacagtatatcgacgcagcatcgacagttttgttgaaaggaagagtggcttgcgaagtgagtaggccgacgccgaccgaaaatccgttaactaatagaaggcacttcacatccaaagataaactccgctaacgaattggtattgaccgagatcatcctcgagaacacgcttgctgagtttactcccgaagaggctgtggcgctgctgtcgattttcgttttcgtcgaaaaaacggactccagcccagacattcctgataagctacaagcggtatgtgtataggacggttttgatatctcccggtgctaaaggcatcggtcacagggacttgaatcgatctacgctgctgccggtcgagtggaaagagttcaagatcgaaaaggggtcgcccatgatgatttctttacaaaattcaagccgggtctagtagaggtcgtttacgaatgggcccgtggcatggtaagctccggatttcgaaggtaaatctttcgggtgtaaatacgaaattctgatgtctgttctactcagcctttcgagcaaattaccgagttgacagacgtcgcggagggcacgatcgttcgctgcattactcgtctcgatgagacttgtcgagaggtgcgtgacgccgcgcgggtcataggagacaaatcgcttttcacaaagatggaagaggcccaactgttgatcaagcgagacagtaagttcgcaccttcccggtcgtctatcgcccgccagctgcttggtctcactgattttcgcctcgcaatgccatagtcgtcttcgctgccagccttgttagttccgttttcccggtgcacagaccccagagctgacggtacttctaatgctgcaacagtacttctgattggtggtccgctcaaccacaaagccacttcgcaattctctaatggctgctgctaccggttgtggtcaagagcattccctcagtgacatcctgttcaaacaatgatcgagtatatttctcccttacaaaccaataaacccttcgcggccattctctatgtatttttcgtagagccttatttcgtcacgttcccagtcatcgccttgaaggctcgcaatgtagagatctacatcctccgcttctgcggacctagaagccatcgcttcgtccgtttgataatgtatgtacctggggatgagtgatgcatgagcctaataccgaagtcaggtgagatgtgtgtttaaatgatagataccattcgtactcttcctgttttgcctcggataagctgggcgctaatagatgtgaaacgataccttcaagctcgtcgttatttagctccggcttttgcatataaatcggtggagcgattggctcgccatgaggcggaggtccgttgatattgattttaaccggacgactgacagcagctaacatgctcaacgatgatgtgttacaacatcgccgtccagtaatataacttaccgaaacgacttggcggcccttgatttgaatgggcttgtatatgccggtaatttcctgcttcaagatcacctcagccgaagttgtaatctgactttctaggtaatctaaactgaacttacgatgaagttttcgctgtcgaattcatagtgaaagtgtagagtcgctgaaattgagacagtagatgcggcttgtagtagtctctccaaacatcataagcagcactgctgccgcctgtcgatctggatggcatttcatcccgagtcagggtagcgtgatcgaaccattgtcggtaatccttgaattctggttgcttccgggtgcgagcgtcggatcgtacgccaaggaacagatcgatcgctgcttgcttatccgcgtccagtaggctgttattgtaataacgcttcacattctccaacagatcccgggaatgactgctccattgcctgggcttgacacgccgatatgtgtccattcggttgactagagctgacccggtgtactgccacgccaatgtatcaccgtgatcgtgatacatttcgatcaacatatcaattgcgtcgctatcgaaatcgagatcgggtgtctcgataacgcctaaagcgtgaagttgatgtcctagagctttttttccgatggagaattgcgctgcgttggtgcgatctaagcaatctatacagttggtgcgacatataccctgctgtagccggacgggatggcgtgtttccccgttcgtccgcatcgctccgccatggaagaaaccagtaagctggatagactcttcagcaatgtcttccaggattccaataacgtcttgcgatttagttttggtcgcttgcgccatatcccaagcaatgtagcgaagctttttactcgcgtctggcgggaggaattgattgaggtacgcaatgcactctgcataggctgacaagagtttactttctcgagcgacagtttccttgccctgaagatcatatcggaacgtgtcagtcgcagcgcacatggtctgcatatcattacggatcttatcaaggcacagctataccttgatcagattgacgatcacaattggagtcccatatcgctcgaggagatcgcgaaagtgccgcccagctgccgcaaagaatgggtcgactaccgcgactgcaaaaattcaccgcacgcatcaggatttaagatccgaaagagagtaaaatcgacttactctctataggtggcctgggagacatgtttgcaacgtcctgtgtccagtgtagaggtatcgacccgcgtagttggacgtacgacgtataattgcttggtgctccaacaccatgatgtactgaatccgtgaacgatgtcacgagcggctccgatactatctgctcggtctctacttcattagcgacatttccctgcgcatatagcacctgatcgatcagtattgacagagtgccggtccaagtgagcgtgaaaggcgcgacgaacccaatcattgacaccccgcttgaggtagcgggtacctgcatgccagcgcgatcttcgggctataagggtggtatagatggtgcgactaagaacaggtatctctgtgggaaaacacaagggggttgacaacaaggtgtcagtaatcgcaacgcttcgctcgtgctgggcttactggcttgatcgacggaaccgtggatcaatggtaagacccaaggatttcgctgtacaactccctcaggttggttgctctcgcataccgcaacatcagctttcggaggtccggagcccgatgtaaaggctcctgcgaagagatgatgattccacatgaatcggatgttgtacctcccagacgacggcggccgagtcaagttcgtttgcagtgtattggtgagatcgtaggagtaactgtggattcaattcaaccgtaatactcaatttgcgtagcggcttcgcatacctgaagtaaaagttctttgacaggtcgacttgctgaaagatgctcagtagtctgaaattacgactcgcgctgagcatactttctgtttctgcgagatcagtcgtccaactcaccttgcttcttcggcggtgcggtcacctttaccgccgagcgggaacatctggaccgttgtcaaagtcagcctttccctcttcgagggtgttcttggcgatacatgctagtgtctcgtcacaatggaagactgcgggccctgaacatttcaggcacatcttcgcaagagaagcgccgttcctatagactgactataatggccacccaacaatgagacgactgatcgcttcgtgcaaagaatgacgtaaaatgtggatgtgaatttgacaaatcctatgattccactaaagacagagatgtctcagtttgcaagaatctctggttgtgtatggcttgttgacggactggaaatcgaggaccttttcaagtccgccggtacttttgttgccatcgtccaccatccgcaacaaggtgtgcaactgattggcatcatataccgtttgatcctctacgatgcaaagggaatccgatgcggtccgatcgatcttgagtacccgatgatgttttgctgaagatgcggtgatgtacaaccgcctgcgatcgatttaagcaaaagtatgccgcacagacaacatcttccactgatctgctgaacatacgtcttagtctcgtacagtgtaaatcggctcaagatctgctccgcgatatccccgtccatgacgaaggcgaggggccaatcttgttaaacgcttaattcttagacgacctcgtctttttgtcgccctcgctccttgaaccggatgaactatggctttgactctctccagccagaccaagtcttgcgtttgtgaggatcaggacgacagaacgcgagtatcagaaaggcgcgtaaccaacatgctcaatgaagaaagggacaaacttcgtttctctcctggtcggtccgaacccgaactctaatattagtcaagggagctccgggcgatggccgatcgaagtgatacgctaaagtgcatggagataattgtgattgatcactcacatttactagctagtagccttgtcgcagcggcctggattgtcatctgggtatctagctagcccacgctagatttagcttacgtcatggtcgcgagacggtcagagagacctgcaaagtgcaacctagggataacactcaataatatgcttcgagcgcacacatcgtgctccttagcctcccatgctctaagagactgaggtttaagtaagaaatatataccggtacttgctactaaagatatcttccgacccagtagcttgctactttactgcaccgctaggcaatccatagtagctccagacttcgacatttccttgaacatgggtttgcagctcagcaattacgattccgacacggagagcgacggagaatctgacgagtcaaagaagattcgttcgaccgtgaaagacccgcccctgacaggaacgaatcaacagaacggacctggggaaacccacgcatccatgccgttgcgagagcgtggcaaacgacctctcaaaattggtccatcacacccactgttagggaaggcctcgaaaccaccttcagctcccgatgacgatattatgcccgcggatgctgctttgtcaagcaaaaaaatccagccgcagcgcacatcatcggccggtggcaagagtggtctcgtcgacatcttacctccccccaagaaaaaggccagaacaatctccaaagcgagtcccgcttcccttgagtcggcctcatctcgtttcggcgacccgagccttgctaagacaatcaggcaagacagtggtggaacgaaagaaccggacatcacggttccgtacaccaccgggaataagaaacacgtggatttgtttggattgggcaagtcgcttagacatgagcgggtctgaccctggtcaatctgaccattccatttcatactaatctcaggatcgactcctccgaacgggaaacagctcaccctcgccgcagatccttccttgacgatctcagccgctccattggagtctttgcctgatccccgcttgtggacgcatttggctgtcgagagagacgcgcagaatccgtactacaacccgtcgaacgatcttgtctcgaaaggcgctttgggtcatgcttggagagatgttacagagcacagtcctgctgacatgccagactgggatgtcaaacggaacatggcggaagctcgtcagctggaagaggagcgcgcgaagctgatggcagcgcctgtatacgctgaacagacatcgtacaaggtgagccttgttagacagcttctcagacgaacgcgaaatctcatgaagcttccgacacaggctgtgggcaggacaaatggactagcgggaaagaggcatcagctatccgctttgctgcaagatgcccattccaatagacgagcgcttgaggatcgcattgcggaaaacaagcgtaataaaagggaagcgggtactaaatacggtttctagcttgtaaaggtctcatggatctgtgtgtacttttgttgctcaatcttgacgctgttccactggcaaaggctttctcgctgcagcgttattcgcagtgacgggtttgcaaggttccgggattggtgaacccaagtcgacgggtgcgttcattacccgaccaattttccgatacttctcgtgcgtacgaaagaaagtcttccatgcttccagactctgtagagcgaattagcacctcagtcagtacaagcgcaaccttccgtaggcggtggcgaacctcaagctccatcgccgtcaagccacgcaggtcgtgcgtaagatgtgtttcaaaacagcctgtaacgaaagctcgggccgcgtctttgcccgcgctggagaatgagacaggtgatctcggttcgttgtcgtttacttggcgatttcacgaaagtggcgtttggcttacaagcagtgataggcgccgcctggtccgtacattctcttcgacgacgttacatcgtaaacctctccatcgataccgacgtataccggaaggtcgttactctcgccgctatagactgctagctcgccaggggttaattcaaggagggatctctatataacgcaaacataagggaagaagggaagagcggagaaaaatagcaatcttggcaagatctcactggaacccagtcattccattgtcggagtatcttccgctcaagaccccagagtgggctgtccaaaatgaagttaccgaccaacatcgcgagaccggcaagcacgatggcatatcggcccaggctccacgttttcaaccttggggcggcgctctgtaccggtaccggcttcattgatggaccgagttcgtattggtcgcggttcctacagatgattcgatagatggcgatcttgattcttcctacggcctacgacttctgctactaagctgatcgcaaagattgtggcagccgcgagtgggtctgtgatcgatctgtgatctgtaatctacatgctttcggctggtcggtagtcagatcgattgagtctcatcccctaccgctcatagccgaggagtgcaaccgaaaccctgatgctggacatgatttggaacgttgttcatttacatttgctacccgcggtgcatatcccggcgaatcgcgattccggtgtatggttcatcgacagcgagacactcgatcggtcagagacacagagtgactaggcgaagcaagttcgcaagttacatttcgtatcatcaactgtatcttgtcagcagtgatagagtctcataactggtaattctcacgagacttttgcatcgagattcctcgaattgccctcattatccacgacattatagacagcgacaaaacgtcagtcgagaagtcgatggaaatgttagaaaagtttacagaaacactgattttgctcgacgccattttacagcctcgcgatgtctgctgttcccgaataccctcctgtcttctgcatgggtaaccctttggtcagtatcatagccgatttcgttcttcgatccaagctgatattcgaggatgcattctcgaaacagctggatcttcaagtgcgagatggtgaaaagctcctcgaaaagtacggattgaaatccaacgacgctattcttgccgaggagaagcacatgcctatgttcgtatgaaatgcaacaaccgcttcccatatcggggccaatgctgaggcttgataatggatttctctcagatacgatgagttggtcaaggattatgacgttacctatgttgccggaggtgccgctcagaacgctgcccgtgcagctgccgtgagttactgggcagccctctaccttgccttccctgtcagcaaactgatccctttcgcctgtctagtatgtcctccctcccaagcacgtggtatacgtgggctcggttggcgatgatcaactcgctgatcagttgcgagccgctaacgacaaggtatgtgtatcgacctgatctttcaactttgataactcagtacggcaactcatgcgatgctttcatataggaaggagtcgaatctgcttatcaagttcattccggcgaaaagaccggagcatgtgccgtcgtaatcacgggtcatgaccggtacgttccagctgcatgatcagcaaacacttccatactcacgaatgctcatcattatttggccctcgatcttctatcaaaggtctttgtgtactactctcgctgctgccgagaaattttcgccgactcatctacaaaagccagagatcaaggcataccttgacaacgctaaattcttctacattggaggatttttcctgacgcatggcatagaaagtgccttggatgtcgccaaagtggccagcgggaaggggaaggtgagctggaggatttattgtattcgttcagaaagtacctgacacacctggaggccaattgcaggtggtcgccttgaatctctcggcacccttcattccccaattcttcaaggtacaattagagcagctcttgccttatgttgacattctcattggaaacgaatctgaggcggaagcgtacgcgactggtcaagggatggctgtaggttccttttttgaaacgcttcacagctgcaatccacctatcaacctgacttctctgcaacaggactccagcatctctcaaatcgccagcgcgatcgccaatctgcccaaatccaatgcgtctcgacctcgccttgtcgtgatcacccagggatccgaatctacgctggtcgcttcctcttcagcctccctttccaagtgcaacattcatccggacgaagcgaaccctaagacttatcccgtgcccaagctctccgacgatcaaattgtggacaccaatggagcgggagatgctttcgccggtgggttcttggctgcccacgctctcggtaaagacttgaacgagtgcatcgaagttgggcataagatgggacagatgtgtgttggccaggtagggcccgccttcaagttccctaaaatcagcgttctgtagagtctgtcatacgtagagacgattagagtcgagcaagcctcaaatcgggcgacttcgaccacatgatagctttcatagcctttatgtggtgtctaacttgctatgcttgctacgtgctcacgcctcgtatcgcgtatcgatcatggatcatggatcatgttacgatgctgctgtttcgatctagtccggaacgtccaaaatgcatcgccccgtggcgtcatcagctcgcgtccctcgtcgcgggctgtgccctgatcaagttacttgagttacttgccgtaactcttcaacacagccgtccgcccgtgcgcggctcaccagaccagatcaccagatcgctaatcgctaattcttgcagcttgattgtcatttagttcgctttcaacgtgttctgaggccctgctcctggcacagtctgatcgacaactacgccagtcttctctttgtcaaccagtcacgtagcagccgtgtgatcgacagctcgacagactctcactttatccggaacgaccagctgcacgactgctcagtcacatcacctcgatagtctgcacgcttgccctgcgaaacaaacctagctagcgggctacctgtcttttctcagtttcagtagagatccgtcaggcatagtctatagctctgaatcactatggccaacaacgctgtgagttcactgaaagctcttcccgatcgagacatgaaactcactcaattgaagcagatccgacgtaaattggtaagagacaatcgccatggctcagccgactcaaatgttttacgagacaagaaactgaccgttcattacgctatgcaccaggtcatcgttggggacggtgcctgcgggaagaccagcctggtaagaatctacatgatacaagtgctgccgaatacagaatcaggttaagtcctccgcttgcccttactatagctgactgtcttcagctgtgagtttcttgaaggtgaaagaacccgtaatcagaacctgctgattgactaaatcccgcatgcatctcaagtgggacaattccccgactcatatgtaagtaatctcacttgatcgctaagattgcgctcacactgctagcatggtatcatgtcgttagtctccaaccgtgttcgacaattttgtggccgacatccagcttgacggtaaacctgtacaccttcaactctgggacacggcaggccaggaagaatacgaacgtcttcggccccttagctattcaaaggcccacgtcatcctgatagcttttagcgttgacacccccgatagtctcgacaacgtgactaacaaggtcagtcatagtggccaccgttggctttcatcagctcatccgatgtgaccattctctcagtggtatgaagaagtcaggtcaatttgtggtcagaatatcccggtcatattggtcggctgcaaaacagacttgcgagagaaggcgagagagaacgggacttcacaaaaggatgcctacgtagaggccgtcgaggtgtgttcttacaaagacacgaataggcgtatgtgagcgccgctaatacgataatcgtgtgatagggtgaacggatatcgaaagcgataggcgccagagcatactacgagtgttcttccttactcaaccagggggttgacgacatcttcgaagcggcaacgcgggctgcgatgctggttcgcgaaagcggtcacggcccttcaaatcccacagcccgcaaagaaacctcatcgggcaagcagtcttcaggcgaccagcacggcaaaaattgctgcttgatcacttaaagacgaggcgctcctcgggtgaagaaaagcacggacgcggtgctggatggccacgatcgctcacggaatagctttacgaagcaatcacgacctatctgtacaattgactacagtcttgtctatcacgatattcccattttacaatctcatttccatatcccgcagatgctcagccgaacacgcccctaatccgggttgacgcataattctatactttgcagtcctcgaacagtcagacacgtgacattgctgcaaggctttccaccgagatgcgagagacgatccggagggagacgtttcagagggtgagttcatctctaagtagctttggggcattcctaaccgcaacgtaagactaccagcacgatattggctatgaaaccggatgggaaggttctttgcgttgaccggtgttggtcgagaggatgcagatcccgttgcatctctcgccgagccgatttctttggtcgaacgccctttgcccgtctgcgccttgagcaagcgatcgatggcctctcgctgcaaggtttgccgagtcaattggacgtgcccggtctctactggaattcccgcttccttaccttgtcgttttcttgtcgttgatcggcttgaagcttgcgtctgcgtgcggtttcctctttccgccgcatcttttcttgttctgtcagcaccattttcttgctatgatctgcatattttgtataggatccaatcaattatttgaaccggcaagatatccgtgtggactatatcgacagtcacaagcggccacaaaccttccggaagaaccatcaaatcctcgacgtaagaggagtcgtgttttgacctttgccgagcagtcatccggtccacgtcgcgagttggccgagatcccccaggtatttcctcatcgccttcgtcggaggatacgtgagccgaagatgctgatggcaaaatttggctccacgtcagaaacttgcccgaggatgccaacattattgatggtctcatgaagaacactcacgctcggattctgaatccatctcgatgtcattcgaccgctgttcaggggcgttcgggaagcgtttatgattcatactggctgcgccatgttgtatgggctttctttgtcggatgacctcatttgttggagaatctgtcggtgatgctacttctaacaccgatctcttcccagtagccgaattctcgactcgggaagatctaggtcgtttactgagtctgttggacgattcggtatcattgctgctcgctgtcacaatcggattcccaacgactttcaatcgcaatttgatacctggcactgcgtctgaggaaggtccggcctcgggaagaatcatcgtggcaggcacctgtctcgttgcagctgttgaccgtcgaacggaccccgcctggggcctttcgataaggccttgaagaagccgagacgaccgatcggtcgaatttcacgtcagagagtgcttcttcccgggcgaagctgatagcgacttaccggccgactctgtgctgccatccgaattcctcgaaactgctacacgctccggggattcggaggtaacgatcctcttggaacgtctagcggacgtcgaggtcaacatgaggttgagatctgacttccaggcagtatcgttattaggcagtattgtatgcgcaataatgatactgctgatacactatactgactgatcatgactgatgtgaagcatctttgcatcttgtgtaccggatccaggtacggtagctataagcagacaagctggcaaccggccgcgaagccaagctatgcaagctacaggttaccgtaagcgtgacgcgaagtcggtcgcgaagttctgatgcggtatacatccaaatttgatttcgcatactcgcttatactttaatacaccttgtcattttactgtcttactggtacttgttcagctcttttgcaacgtcttctgccagcatctatctaggttatcggcgtagctacatagtcgattacgcagttgccgaatcacagtcgcagcagtcgacagaaactttgcacttgacttactgggcgagcttcaaatccccccctgccgccccctcggtactcgaccactcacactagaccacaacaccgataatcccatgatggatgggtcacaagcccagacctccgtcgagacatcggggtctccggcagaatttctcaagaacgttgttggcaaacaggttaaagtccgcatcggcagcggtatcgattatgagggtaagtgtatcgcatggctcttccttggatgtggggcgcaattgcgtaacactgacgcctgatcgctgtaggaacgctttcctgtctggatggctacatgaacgtagcgatggagaatacacaagaggtcgtagctgggcagacaaagaacagctatggtgacgctttcatacgaggaaataatggtacgagagaccagcccaaccttcatgattgttcgcacgtgctgagagtacgacacttgcagtgctatatatctcggctaaggaagatatttagtagaaatgagatgtacttggcacactcagccgccgcaagcacgatcttcgaccacacaaaatcccgatcacaagggttgtcgagttgcgtcattcgctgtgtggcgctcgacgtgcgaaagagatcatccatatcccgctttacgcagtctctctgacatggaaggatacaaatagacaagtcttttaaagagtatccttgaccacagtgccccgctccgaagtgtagattccgtccaagaactttcggatctgtgacagattaatgccgatcgtcaatatatgaatctcgttatcagtgatcacacgatcagggagacttacatccttctccttgactcgacatttgtcggtgatgctggcagcggattgagagacgttctcgatgtcgtttccggagatgaccaactcgtccttggaaccctcagcgatggtaactccgtcgagcatagggcacttcctgacgaccttctcgcccactgcgcatgaatggagaaagctgggttgagcgcaacatcccgaccggaacaatcgaatccagacttacagaagttacggatctcaacatcctttccaccagctccgatgacagggttgatggggaaatgggcgtagacaagcctcatcttgtactcgaatccctattgatacgtgtttggatcaggaaccgcagcaattcgctgaacctggcgccagccgacataccttcgtgacaccggtgaacatgttgctgaccatcgacttgacggtacgcaaacaggcgacgtgctttcgggcaccgtgccagacggtaaagacaacctggttacccttctgctggttcttgacctaagatgcaaccacatccgctagtcagccatccatccacgcgaaggggtggctgtccgcatgaagggttgaggtgggattaggggggccgcggaagagtcatccggaccagaactagaaggcacaacctcaacattttccgacctcccgatcgaagtgttttggtgcatgtccttcccctaaagcatcaagatctccgcgctatatgcgtcaatcgttgcctggaaactggacctcacaacttgaggtacggccttctttttcgatgcgaatatacgtcctttggcagattgatatgcaggaggccacttgcgcagggaatgttcttgcgcggcgtcgctcactcacgatttgaatgtccatctggatgtgcttgacagccttggtcaaggttcctcgggggccagtaacggtgaccaccctggacttgagcttgatctcaacgccctcgggaatgggaagagtctcgatggaagaaaggtccttcatttttgccggagattttgtggcggtgagctaactgactatattgtcgacggcttgaacacaagggacaaatctgtatgaccgctgacttgatgtcgaccatatcgattcaccttgttacctgacttgactctggttctccgagcttcgaaccttcctgggactcatcgtccaccagagtgcgcgcgagctcctagagggaggggcgtaagcagtagaggcttgtttccgcgagggcaagagcgcttctcgggcttaagagccgatgcgcttccagttgacgcgcgagacacccaacctattacaaacgtcgtagacgggtggcacccaacgcgttgggtggtagggagataacctggagttcttccaatcaatcagcttcccattatggtaacataattcatgatggcgatgacggaatacaagtagagtgctggtcaaccagtgtatatgcgttgagataagcagcattgagcgatgagcaggggggaatctcgcattcagcatactgagcggacatcgcatgtattttgaacctgtgttgatcaacgatccacggatcacggacgatctacccatgtccgcgatttctgacatcacgtaattttacgtagaggatcctagcgcgactgcaaactttcgtcgggcgtcggggtaacagacgaagtgatgttgtacatacttgcacagcgattaggccgccaaacttgcgctgtagattcaaagcgacatatctatcacgcagaccattcaggacgctcagaagccgtacaatgttcgtggatatgccttgtcctcgggttacgatggaatctccgttgacttgtttaaagcaggtcttcaaccattctgggaatcaactttgggcagtctttcgcatcgatcgctgtaattggcaaggtgaatcatttccgcgtgatgttcgaattggaattccctgcttacgcttactacttacggacgaaaggagggccatgcaagctgcatcgccaacgaggaaggcgaacgacagattgcttgtgcaatctcgtacaatggcgaagaggtcgtaagccaaggaagagtgcttcaatcactgattcggcgttcccaggatgttcattacaagtttgatctcttagtacattggcaacggagcgaagccgcaactcgtaaagaatggcaataacactatcactggattccgcaacctcttggggcaaaagtaagtgcgagacaaattccgcatgttgctagattgggatagtaccaacagcaccaatttgtagctccaaggattcccagtcggaggagtcgacatttggtgctcctgtagagtttggtcaggatgggcccagctacaaggtcgaagtcgttgttcccccagcacctatcgctactccagcctctcgctccgctgctccgtctggagccgcaacgcctgccagccgagaacccgtctctgctcagcaaacggtcactgttcctgaggtcaccgggttgtttctcaagaccctgtatgacagcgcgaccgattttcttggaaccgcaccaacgggtgttgtgatttcttgcccggcctttttcgccgacgagcagaagaaagctttgagagacgttgcagaacaagctggcatcccggtggttcaaatcctggatgagaccgctgcggcactggtagcttacagggtcggcctggtggaggagcgaaaggaacgcaatcttctaggggctccggacgagggggacgctggcgagatggagtcgagggacaagaccgtcgcagttgtcgacatgggcgaaactagtctcactgtgactatcgcacagaccggggagggggagtatgtcaagctggcagagcagagagatgacaagcttggtggtcgtgccttcgacgaattggtgagtgcatgctgcgccgtagcttgataactcgaacctcatttgggccgagaatgatatggctgacacatcgtctcctcagctctgtgcgcacttcgcgaaggagttcacaaagaagaccaaggtccccttgagcctgccatgtggtcctcaatcttcggtcgctgacaaacgtgcggagatgaagttgagactcgccgttgagcacaccaaacgaagcctcagcgcaagtacaggagcggcgacatgtgctgtggtgggtaggcagctacttcttcctcagaaatgttatctgaaatcagcaacgcttgcaggaatcgctcaaggatggtatggacctttcagcctcgatcaaccgtattaggttcgatagtttggcttctactgttttccggcgcatcggagacaatatcaaagctgcgcttgagaaagctcggcttgacatcgcgcagctggacgaggtgagatctgacgccttcttcctgaagtacttagctaaccttgcgccatctccagattctcttggtcggagcttccactctccttcccggcattgccaaccatcttgccactcttgtcgccccgacggtgccggtgactgccaagttagacccgtctcaggttattgctgtgggctgtgcgttgcaggcgtatcatctgtctcagttgccagaggacttgcccataggcaaggtactcggtaacacatccagcaatactgcaagcaaacctatcggaatcgttttccccgacctaatccaagaaaacgagtctaccgttcactccgtggtcatcccagctggagtccgcttgccctgtcgacgacgggtgcaattcgccgtggcaccgggcactagcaaggttgctttcgaattctgggaagccccggcagaagtcaaggttacacagattcagcctcctcctctcagtgacgatggtgacgcggacgacgtagatgatgatcaggacgaagagatggaggaagtccgcagtgtttcatactcacgcgaagcacttgtagctgtcggggaggtatctaccgaacaacagaccgacatcgtcctggaagtaatcttgcgacgcgattcgaccgtcgagtggcatgtttgtcagagcgcctaggtggcgtggtctggatagctgctgggctgttgggaaaccggcagcatgcttacgagttgtatggaatcgtccctgtagctgtgacgacatagatgaatctgtgattgaatgctgcaatgactcgtcaggtctcgcagggagtagcggtacatcgagtgttaagagtctgtagctggattcgctatgtaaaggacaccgtgggaaatatcaaaagcctcgcctagatgaggggcaggagatgcgtacaaatggccatgtacctgcacccactgatgacgacggcaatgctccttgtcaacggatgactgagtgctgccactcgcgacctgttcggtcaactggaacaattagcaacacctaggtggttggctatagccttacgtatactatcacagccaagatgggtggcaaggtcaacatcggtttgcctgattgtcaaaaacacttgacttgactctgcaatatacggtactcatggaggacgcaccagcaaacctgcttgatcaacggacattgcaggctaagggatggaaatacatatatcgcaaagtgccacaacagggctgaccttgtgtgggaagtattgtgaatatctactgtgaagtactttgaggtgcttaaagcgggtatcacttgtgtgagatggttgaccgtctgttcagtgatacaaaaacctgtaacgacgactgttaggaatatgtaatattgatgtttgattcctccaagtctttgctcatcacattgtaaaatgtgtatgagaacactcaggtgtatacatggtgaaaagcaagccatattgtactagccctccgcatgcttgtcattcgacttacaaattcgttgctctttgttgcatacttgctatggtaccaaggtgtacctttaatatgttcataggttggggcaatgtgcatcaagcaagtcgtctttccaatcgttctctcactatgattgactaggtgttcccggtgcggataggatgccatggttggctataagagagtacagactcattgagagttgtacataccgttgtaacttcctgtcacgaggtacccgttgacccagaccaataactaccaaacaattgcgcgcgtgtgcaatatacaaccaacatgacacgactaaagatcctgatgctgccccaattccaccatctaactttacctcaaatatattccagaagataagtgacaagaaccaccaacaccaacacgccaccagcaagcttcaactccaacttggctctgaaaccctttgacatatatatatatacatatatgtatatacatcttcagatcatgctcctttgtagtttcttgtagaggtttccctctcaggataatactatgatatgttacttctttctggaatctgtggacaagtcccgtattgcatatccagttccttgtttgacaccttgtcactctacatcaacactgttgtctgactagcctacagggcagactatatgaaccgatctgtttgccaagtcgactcattcctctttgcctctcttattgtccacttggtccccttctttggcccaagcgtgacagatcccaaccgatgttgctggactctgtccctgacactcttatagaatccaagcatagtcatcacatctgacgcacgtctatctacccaaacatggattcaaataggtcgcaacattactctcagacttgctggatgttgcacagttatgcaatcatcccttagcagctgcatgttacgggtgataagcacgcaggtttccagaacagtacataataggctaaccttgatacgcaggtctcgacaacgtgtggggggtctggacttagtgctaaagatgcgtgaaaacactgagggctgggtaagcgtggtagcgtcaagggtagggtctgacggccgaaatcagtaccggatccaaggtctggttacataatcgtaaacaaggtagcgtagattgacatctcctgccagggtattgtctaaactcaagtaagacatgtcaattcatctagatgcctaaggtgcatgagtatcgagtaacattggtagatattggtcgatttatcgtaaggtgattgagtggaagcaatactcacagtgttggtggtatcgacttggtgtttgtagttgtatttcctacctctcaatgttgacgtctagtaaagtctgtgtctggcgctccctgcctcgacctgttgccattaccgtgctgttatgtgcgtcctcgatgttgatgtccaatcttgcgctgtgataccgcagcatatctgctcacacattgcatctgcctcaaaacttgacaccaagacttttgtgacaaaaagatgcttggtcagcaggcggagaattcttgagatcacctgtgatacctatgttgtgaagtaacaactagatccacaaagattggttacttgctgggtctaggcaatagcaatggtctattgctagtgctgatcttgccttgttgtgaaggggaatcaatgttgcttgcataaaagtaaagtagtacatgagaggaggaaaggaaatgagacccaaatggtctcctatatatacttttctggtgagcatgtcctcctagtgtcctcccagtgtacttgcgactaggcttgttgcgaatttgcgactcagacgcatgagtgcgactccagtcgcaaatgagtcactgatgtgtgactccagtcacaaatgagtcactaatgtgcgactccagttgcataagcgtgactccagtcacaacatgtgatcctagtcacatgttgaccctttgtgcttgagattgcaccctgagcatcacctatgatgtcatagcatgccaatcttcaacactccctctcaagctcaagctcaaagccatccttctttgacctgagactttgtgtgtttttgtcttttcttattgaaccattcctgagttgttgttctcattctgaagtgagccgcatcctgaaaagattggagtaactttttgacttccagaatgtcttgtgatccctgctcactccatcattctagatggatgagttgacagttgtgcttgtgtttgatatccttcaatggcttggtaagcatgtctgctgcctgaccgttggttccaacatggtgaatggtgatatgtccattgtccaccatctctctgatgtagtgatgtctgatatcaatatgctttgacctcttatggtgagctgggttgcctgccaatgccagagctccttgatggtcacagtagaggtgagttggcttgtccttgctgacgaagcctagttcctgtagcatcctgctgagccacatagcttccttggccgcttctgctaaagccatacactctgcttcacaggtagatgtggctactgtgctttgcctgatagaggtccatgagactgctgaccccaacagcttgaagcagtaccctgtggtgctcctccttgtctccatgtctcctgcatagtctgcatcacagtatcccatgaggctgtgttgactgccttctgtgttgttgtccagttgaccaagggtgttaagggcgggtcgatcgggcaaactacgcggaatcgaatctcgacggcggaagcaaatgccgagcgcggatgtaaataactggagtcgtaggttgttgacgttccgatgatcgtagggatttgtcgtccgttgtttgtcgataaacgttgaggacagagtcgcgaaggatctgtatggctgcagatggttctatggggtgctccagggtcttatcggtcaagtggagtcgataaggggcaagtagaagcaatactcgaagggtgcaaaggtcataagcgtagtctcgtcgatctagcctcccgtagatggataacctctccactagtactcgtgttcggtaggtgtaactctcggtactaatgaatgcaatattggcgcttaacctctcttctactacaagtattctcgacaaggatcggtcgagaatcgtcgacacttatatagtcgttcggtcaagcgtataaagtgaaaatgagtcgtacgagtcgaataatcggaaaggagcggagaataatcgtatagcaagtgtccgtgcgcagtcaggggtctccgagttatgtcccaaggtttcagggtgtatcctgtcgagttgtacgagcgtatgttgataaggtttgtgtattgaatgatgaaacgaggaggtggtcggcattcgccgaggatcgtgtttttccgtcgtttgtcggacgataacggccggtaatcggtggtatgtcccgggccggtgtaagtagatgatccgaggtttgtcggtgactgccggtcgataatcgctgacaacagtcgatgttcggatgtgtaagtgatttgatcgtaggtgtcgtatatcgaggtagtcgtttgaatatgctattgtttacgttgtcgatatttgtatctgcacgtgtgtggttgcgcgcgcgctgaatccgcggatgagggtctactccgtaacaaagggtgagaaccttgtcaatggtacctttcaagtatgccaaagtcctcttggccgccttgaggtgttgttcagatggattgctgctggacctgctgagatagccaacagcaaagactatgtccggtcttgctggcatggcactccacatcaaggatcccactatctgctgatagagtgttttcctgttcttgtcttccttgatggtgttgtcctgccttctcataatagcatcctaaagaggtgtggttgcagtcttggcatcttgcatgccaaacctatccagtaccctctggatgtagccttctcgactgagtgagatggtcctgctgggcctgtgtctctccagcttgagtccaaggatataggtggccgtacctatgtctgaccatttccatttctccttcaatgcatccttgatgccattgatggtgctcatgtcttgagcagcaatcaggacatcatccacatagagtagtagatatgcccgtttcttctcgtgatagtaaagtccccagtctgctgccaatctggtgagccctaactctcctaggtatgtgctgatgagctgccaccatactgtcacgggaggtctagccgcgaagtcggtgaaaggttgattacgcgtccgtacttaatcgggcaatttagtaaccttacgggtctagacgtggggtaaagtgacctaagctcttgtaatgtagtgataaagaagagatggaaaatcgacgcttgagctcataacccttgctcaagcgtcttcaacgatactaagacacaactaagatgtcctttctcgtacgggatagcacaaaaacctccggctcccgtacgtgttgctctttggccaggttgtatcggtcataacacgcgcgccgcgctgtgacacataccctaggtgattgcttgagaccatagagagatctgacaagcttcagtccagtggacttcttgtcttgctttgggtatctattcgggaaacccatgtaaatgtcttcctccaatgtgccattgaggaaggctgtatctgcatccatctggtagagctccaagtcctgagctgccacaatgatgagcagtatcctgagtgaggcaagcctggctacagggcttttagtgtcaaagtagttgatgccatactcctgagtgaagcctctggcaacaattcttgctttgtatttgaccacctctcctctttcattgagctttgtcttgaagacccatttggagtctaccaagctagctccctctggaaccttgacctcttgccatgttccagtatccttgactgacttgagttccttgtcgatggcttcttgccacaagtcagaccttgcgttgtgcacggctgccctgtatgactgagggttctcctgaacatctgcagcatgcacacttgccagtgccatttcctctatgatgttcagtctgggtgatcttctcctgatgtcagccctgggtttgagcgacatgggatcctcatcattggaatcttcttcttcctctgattctcctatctgaggggaaggttctctgtaatccattgcagggggattatcttgaactgcaggtggagaagttgtttgtctctccctctgctcctgtcgatcctgttgatcctcttcatcctgtgaaagatcctcagtcacagcgttacggcggagctttgctaagtcgcgtctaatgaatatctcagtgtcaatgttggtacggatcgtaggtagtcacaacaggagtgaagctgagtttggttaatggaagcgaattcagttgggatgatacgaatccgggttgatgtacggataaggaagtaatgtcgctagaggtagctaggattgaaggcttgttcagtacgaacggtgggacgtctactacttagcgagtgtcctggattgtaacctcttcacagtacgtcttgaagatgtggtgctgttgcaaatcaataggcgtaaatagaatgtgatattggaacttgacctgcctagtacaagaacgccgtctgtcggattcggtcaagttctactaagtatatatacgaaaccgagagtagtcgtagcgggtcgagaacaataggcggtccaagaacggtgaagcgaatttggaacaaagagaaccaaatcgagggtcgagagtcggtcatctaacaaagatgaatcgttgttgctgagtcgagatgtctttgttcgatgtagtcagttgtcgaactatgaggtctttgttcgatatccgtcgatgccgctattgttcttcgctcatggtaatatcgaatatgcgttgtgtcgatcgtagagagggtgacgagaccgcgcgagccgaagccagccgcgtaggaaccggatccgcgtcgcttcccgtaacattcttgaagcatccaaggacatccattgctgtctttgttttgagacctccaatgcaggtcagccctgtcaagtcatcaataaaggtcacataatagatgtgcccattggtgtctggcttgaggggtccagctatgtctgagtgcacaatctccaatggctcttgagctgccactgagatgtcaccaaaggtaagcctggttgtctttgcaatagcacagacttcacactcttccatcttgaaggtagatgtatccttgttggtgatatgcaactgtcctgatgctgcaagcttcttgatggtactgacatccatgtgtcctagtctgttgtgccatccttgtacggtgtccttgtcttagatggtgaggtaggcatcctctgccttgttctcctccatacgctctgatacagcatcttcttcctgttcagcttgactatagtagtcctttctgagcggcaacttgaatgccctcaaggttcctcctgcacctgtcttgtagactgggatgttgatgccaccttggctgatcatgccaccatgtttggtgatctgcacatcccatcccttttcgatgagagttccttgactgagaaggttggctggtgcatcttccataagcaccacattgtgtagagtcaaacagtgttgactttggggtaacttcatggtaatcttgcctccatattcagagactatagcaccaccagaggctgtcctgaatctcttggggaaactcagcctctccagctggctgaacacgtccttgctgttgcagatgtgcgagctagctctcagatcaacaagccattctatgctctcttccttgaccagagcagcatattcttcttcagagatctcttgaatggctgcacctgccatattcctgtgcagtgctaccagatcgtctgtaggcttgttgaacccagatctattctgttgtcctttgggtttgtgggttatcctgttgcaaataggcatgccatgattggctcatggatgcaggaagcaatctcaaccacaaagcctcattctgtagaatgtacattgtacattgtactttgtacaatctacaggattcactgtaaaatgtacaggtttcaaggggttgtgaagccatgaaggctatcatcagaatagtatatataggaggccaatttggcctcattcccttttacctctcatgtactactctactttaatgcaagcaacattgatcatcctttcacagcaaggcaacatctatcatctgcaagagacaatagacatagtgactacaaccattaccaaggagtggctgcacaccattggcagcagccaatatcacaacttatccatctcctatcttagaagatctgcaccctttgctggagtgtccttgtttcccacagttccaacaagataggttgttcttgttgaaggactggtccttgttattcctttgttgaccaaatcctttcctttgcacatgactggttctcttgaccatcattgtattttgcagacttacttcatcctgacacttgatgtcagcaatgtaagtgttgaacattcccctgagattttcaaatgtggaagttggttgctgggtgatctccttgatcctttgcagtgacttccactccaacttgagtgattcataagtcacaggtaaagccctaaggaaataggtagctttatcctcttcagacagcttaaagttggctgtctgggctttcagcagtagtgtgctgaacagctctaggaacttgactggatcatctccttcactcatcctgagtgtagtgatcctttcttctatgtctgccttgtagttcctgtcgtccatctggtgaagcttggatagcttgtcccagatctgtttggaggtactgcatcctgctagttcatcctgatgcctgaggagacattgagtctcataaggcccatgaccttctgatccttctccttccaggtcttccattccctatacacttctaggcatagagagactatagctgaggcaggagctacttttcagccatccttttcctcaatctctgtaggtctgataggtctttccttcagatcctctgtaagcacgtgcagtgctccatagacaagtgctccatcttcaactgcatttctccattgaaagtagttgtccaatccagtcaggatgggtatcctactggtgactggagagcttgaattgttggtatccatgatgtccaacagtatcgatcctgtccaactatgtccagtgatatctcttgatgatcctgatagttgaggatgttgattgtggttcgctaactctgatgtagattaggccacaactactgggctcataacctgttgtgaagtaacaactagatccacaaagattggttacttgctgggtctaggcaatagcaatggtctattgctagtgctgatcttgccttgttgtgaaggggaatcaatgttgcttgcataaaagtaaagtagtacatgagaggaggaaaggaaatgagacccaaatggtctcctatatatacttttctggtgagcatgtcctcctagtgtcctcccagtgtacttgcgactaggcttgttgcgaatttgcgactcagacgcatgagtgcgactccagtcgcaaatgagtcactgatgtgtgactccagtcacaaatgagtcactaatgtgcgactccagttgcataagcgtgactccagtcacaacatgtgatcctagtcacatgttgaccctttgtgcttgagattgcaccctgagcatcacctgtgatgtcatagcatgccaatcttcaacactccctctcaagctcaagctcaaagccctcctctttgcctctcttattgtccacttggtccccttctttggcccaagcgtataactttggcacttgatgtattttcaatgagataacacaccgtgcagtgtccgcttgctttacagctgatggaccaatttgattgtatgatctctcctactatatctccagtggtatggtaggttgtgtgtcaaatgtaacagttgtgcctgatcatctaaagtacaagttgtttggttttccagctgcttcacgtgcctctatatacccttgcaggatgtacccactatcacacactaaattgcacaaacaaactaatcgtgtgtgcggacgtgtgctgcatgcatgttgttacgattgagtctcgctgctcgtctgtctactgactatggtggtcatggcacacaggtcctggattcaagcttttacgtcatatgcgcgtcaactatggacctgtgagaaaggctcagtgcagatgctaagtattaagcgtgatgtcaagtattgcttgacaagtttgttagtaattgatgtaacctctcctagcacgtcttcaaaagaacagttgtgtgttgaatgtgataactatgcttgaattctatagaagtgacaagggtctgtacaacttcccatgagtttgtgctacattgtatatatacttcaaagacaacttgttacctgcaagatcatccccaagatttggctggatagcaaggttgctatgcagctgtgtctctccaacatgagtttgtgctgcattgcgtctcttcaacagtgaacgtccgcggcgcgtatattggatccgtctctgagctaacctgtctgcggtgcgcttaactgtagtgccaagctcacaaatcggtatcgccatgtgacatatgcgctgcaccagaactgtagtttggcccatgatgctgagccagtgaacttatctggtgtagccgctgtattggactgctcgatggtctttcatgcaacatccaaatttgccctgtcgcagctctgcatacatagttgaggaatattccatccggatgcttgagacagctattacagtctcagtgtaattgcttccgtaaaatccctccagctattgctttcactgccacttctctccaggtcctttacctataaatcgaccggcgccgcccaccaattcacatatacccacgcgtgaatggacctagttagttggcgttatgatgcggagatgttcggattccgtcaaaggaatgtctctcgacttgtcgcctgcagcggctctgcaccctatcttctttctgtcagatcgcccgaccaagcatttgctcggctggatctttatagacatggccgagaggaaagttgtacagcggctcttaaatcgagtcaatttaacgctcctgcatggccctcgctgcgaagtgtctacaagggctgtcggcgctcgtctcgcgctacttgttgctgaggccgagcagagaaaggttccgcaagcggtgccggcacatcaaacctgtgcggtatgaattgtccggaagtgcctgctgcaggccaagcatgaacggctgcaggagaaaggtttgaacgtccccagattggagcaggggttcctgcaaatgtcgttccccagtgggagctgctcatgctcgatccagctggccaagtcggacctaaggcgttatggctatgagatactcgtctgggtgccggaatgatcacctcgtcatccccggaagatagggcagccgatcctagcactctgtcgtggctaggcatgtgcgcagtacgggcctgggcgctgtgaccattatggtcgaccgtttgttcgtgttggagagaaaccccggatggtcgtggccgcccgataggctgtattggtccgatagggtcttgtaatcgggcgattgagtgcgtttccgttgagccgaccaggagcggtgcgctatggtgaccactatggcgcaagggggcaggattggttgagagaattgaaggatatgtcgcttccgtgaattgtccgagggcagtaggattagaagcgtaaataccgctaccaccgctgacgttactagagactgcgggatgagtacccgaggaaagaatcgcgccggcgctattcgatagaccagccggctctactgcagcgtaggccaatgccgtggctgaagtcggagtatcgctgagtggcctttcttgtagcatattaccgacggtcggggcatttgctggatatagctcagcatgtcgcgaaatggggccttcctcggcgagaacatgaccttgcacgatcgagtcttttctgtccgatccggtcattgcctgggccgctggatgcaacgcaggagcggggccctcctgcgacctggtcgacgtatccaaaatcaaatctggaccatctccttcggttgctctatgcccttggtcgcttggctgacgatgtaacacattgccagcaacgacaccggctgtgataggaaccagtccctcgggctccggcggactctctttaaagagattcgagggtgatttcggctgagcagccgatggcatcggctgagcagtcgaatcatcagatcgaagcggtcgctgagttccggttcaatcaggtctaagcgcgcgggttgagcagtctcgaaggtctggactcacaagaacctctgcgctgactacctgtttagcttttgatcgaagttccctctccttctgctttttggccctctccacttctctttctcgctcttgcctcttccgacgttcgtcttccttgcgtagctgatcctcctgtcgggctctcttctccgcttctcgtctgacccgctcatcctctcgtcgccgattggcttccctctcagcggtggcttgtctagcgcgaagctcctcggcttccgctgccaataaagcttcccgcttggccttctcatcttcctttgcttgcttttgtaggctacaattcgggcatcgagatcagcatgaaggactcgcgacgctcaacgtggcgctaatcctaccgtcgcttgtcctttttcttttgagcgtctttggctttccgcgcctctctggcttccgctgcattctcctcttcctccaattctttcagaaattgcaactgcttctgctgcgcgagttgctctcgatatgcctgcaaaactctttgctcaaaggatctcgctgcaaatacttggaaaatccggcggccctcctcaagcttgtgggtctgggcacatcaagcgaagcgggatgcttgtcaatagcgaatcgctgcgggcctaaggttatacgatacgcacttcgcccaaccgttctgcccgatcatctccgctgccgagatcacttggggtaagcgagacagcctcatcaggcaaagctatgagacggaaccgacctgtcttcctcttccacgttggaatgatttggcatcggcttcgcttgggctgttaaggctctctcccgaaaaagcctgcgttccgcaaggtgttccatcatttcaaggaagcgctgcccgtcattcctaagaagatcatctgccactgtcaatacgccttctcgtagagaaggcaagacaagtgttgatgaggacagatttcggcgcatgaggccgctaccgctcacccttgatactcgatagctctccctgaaaggagacaaaatcgggtgcttcggtctcctgagaatggctctgcgtaggatgtgcatgtaacgctttggcacgactgcctatcgatgatttctgagcgtctctgccggtctgattttcgtagccatcgaaatcgtcttcaattggatctgcatcattcgatctcaagtcttcctcctcttccagctcatcctcatcttcctcgtcatactcgtcgtcatcgtcgtcgtcgtagtcttcgtcgctatcgccgatggtgcggtcattgatctgcgtgtcatgatacggtagcggggcaaggtagtccggatggaggacgttcccggtggagtcgacctctacgctgccggggaacggtcctggaccagctgaattagcagtctcatcatcaatgacgctatcagcacgctggtggcgcgattcgtaaacctcgagttccgtttcgtaagctccgtaaaggatctccagttcgttctcaatggtgacgcgctttctgccgcaaattgagcagctacatgcatggcgttggtagtccttcatcctcttcaacacggcatctttttccgttctgaccagccttcgtcgatccgggggaggcagtcctctccagaagtatttgattctatcccgttcttcagctgtactagtctgccagacacgaacaggagcaggagctgacggtccaggcttgatcttggtatttgcggtaattccattcttggtctggatccccgaattggacgtcgctggtggtgtctgttggcacgggacagtcgagggattgataggtgctttgccagcagcccgagcagaacgattcgacggagcggcaggcgggtgtgcaaccggaggtttcatgggagattgcgaaacgctaggctgcattggttgtttgcccgctgcgcgagatgatggcggaacaaggccagacggagctggaggccccgtcgccacctgctgtgcgggtgaccgtagctgagcaggcttcagaccacttgtggccttttcgcttgatatgggagagccgtggcctgaaccgtacttattctcttcgctgggagcatgcaattcctgcgtaggactggccgccacggggtttgtgtttggagaatctatcccggctttggaaatcgaggaagcaatatgataatccgcattctcgtggagcttgggaccacctcttttgacatgtgatgctgagtaagaagaagctgagcgattacaaattccatatgcggcagatcagtaacggacgacacctcgccttccagatcaggaacactcaccagagagagatgtatcttgggagccatagtgagatgccgttggcggtacttcgcaagagcttggcaacccgctgccagccgtgctaacgatgttttgtgccatggcatacattgagcgttgaccgccggcccctcctacccctccaggtaggacaccgggaccattcccctgcacggtcagattgcccgccagcggcaaggtattccttatgaagttgcgcaggtgcactggtagtgacgaccaataagcgtcatcggaaccgaagcttgtttctgccatgcgtcgatagagctcgtccgaggtcctggccagatcgtgttgattgagactgcattccatcctttccaggccaatatgaggcgtcttcagatttcagttcacagaatagctggcgatccgacagcgacctaggcttagcctgactcgctatacgggagtgcgtcttgttgaacggtggtcaagtatgaatcggtgtgcgagctcttcgcaagtcttatgacagatatctaacatatgcagctccgagatcatgctatggcagccagcagtcatcttaatcaggagcctaagggttgcatttatcaagtgatgcaggatacagcttccttaagtacagcctggtgggtttcacacgcgcgacacagcgaaccaacggctctcaatgacttgcatgacttgatgatggttgatgctttcgaagatatagactgtataactcaacgtacaatgtgcatgtccaacaggatggataaagcacaggtctaccgtaagcctacatcggcttttctctacaccacgcgatatattccactgttggcttcagtgtcgatttccgcttcaatctgagcattattgcctgcatttctaacctcgatgacctgcaatgaatttgtcgtactgtgagttacgagtgcctcggttccagactcatcatatcaacgaacctctagcccggaaatactccgttcacttcggaatccgatgtcaatggggaagaagctgtcggatccacccgcttcgcaggtgaattcaagattgcccgcttgctcatcactgttgatttccggtatggtccaacagaggatgccttcctgggtttcccaatcgccagtcgataagctgacatcccgtgcgacccgtctgtaaacaggcagataatcagcgactttgcactatctgtactagacgggcggacgtactccaagggaactcgcacggtcacgtcgcgtagacacgaagtcggtgtgaccagattgtattcgatgttggcggtctcggtgccgtccggattctcagtccgccagcaagtcactaaaatacgtgcgtgcgatcagtacagcatcgcaaatgatcgtcaagctgggcttacgagttagaggcaagacgccgtcatccttggatgtgaacttccaacgcaatacacccaagccctgtccgacaggaaagcttttcccagaatccttaagcgcaatcaacttctgatcgctagaggcggagaatttattgatattgggatgttgctgaaattgcagtgtagaggacgccgctttgtattgaggaggcaaatcgccaagcaacagagatactttcgcgtaggctggattattgattcgaagatccatgtctcctttcagatcaaacgcttcgagatctccttcgcgtgtcatccgcgcattgaccgtctcgcggatcttgatgtgaatgctatatatggcgatggtcaatggtcaccgtaaaacgtttacgactaccagctctgacccactcatgtgtctccgtgctcgatgcaccatcttcttgcagatgctgagtggatttagactcaagttgagcggcctgcacttcaggctttgtgaaggtgggtacatcttccacagctgccagaaagtccgattgctttcccttcttgcctagcttcatccctgtccccttgaaattcggtttggtaggagcagtgggggattttgatctagcggaaaatatgctatgagcagtcgtgctccgtgtaagatcgaaggcacatacctgctctcccgctccaacgggtagctctcctgacgagcgacaggtgcataaccacctgcgccggcattataactgttccccgaaaaggccccagactggttggttcgcgtagaagtgccttggttcattctttgttgttcacggcgttgcatttcgagctgtttggctcgtctcttcagctcttcctttgcctcggcctctttgttctggattaagcagggaacaaatcagtctaatcaaggatcttgtttccgtatgctgtacgtaactcatacttacgcgagcgatgatatcttgaatcttctcttcatgcgattcaccttccaagatgtttctaatttgttgaaggctcgcgttctccttgtaaccaagggagacgacttcatcaaaggcgctcaaaagttcaaaagagttcgccagaatggctggctccgacaaggacggagtcaaggacgtgatcaaccggacgacgagcgataaagtggaaatatcctgcaggaatcggtcacaaggggtcaatcaatcttgtgttcatgcggcggagggtttgcagacggctcacttgtaggatattcgaccccttgttcgtgatgagcatcacatacaactcatcgaagggttggtaaacgtaacggacttctgcggtctccacggtggtgtgctgcgagttcaccgggatcaatttcgggaacgaggtcagaagtccgtcgatgcgcgatttcggcagcgggcggaattgtcttgagagaacagctgattttgtagaggagtgtcagagtcgtatttatcggtgtggacgagtaggcgggtaagagtgtaaattgatcggacttacgcttcccgcttttcgtggtgattgcgattgaaaggaccacctgcatgcgaagtgagcatctgagcagccgttctgaatattgcgtcatctcccctcgactacgagtcacgacataccattgtcgagacgatgacagctgatcttgaagtgatatcgagtaggttcgaggggcaggatggtgtttacggtgcgtggttgggccagaacggtttgcgagggaaggtgaccaacagcggcttcgtgtgtagtaacagtcttcgcaccaaagtacaagcaacgagtcgagatatgtcttcgtaacgtgtaaggaggccgtgaattgaagagaacaaacaaaatgatcgtattgttgatacctagcagttagcagctagcagctagcagctagcagaccgcccgagcctgctgtctcctcatcctctcacgccacgcgtcaacgaccgactcttctcacgagcctcctcacggctgatgaatggccggacttgaccgccctcttgcccctctcctatgtccccctgatccccctgaattggtctctcaacgaacagtccgaactgcacccccgttgttgcagtcggatatcatacagagactcgatcaccgtcttggatatcttggttcaagtcagaccaccgttacgcagcaaacattttcgaacgtgcattgaatcatcagagagaaatacacttgcgatcggttgcgagatggatgacgccaggatacttcaggacgccttgaggtcagttcagcaggcgtgtcgaatagtacacgtcctcagcagctcaggttgtattgtatgagcgatcagtgtcgtcaaggtccaatccgtcgccatgaagagaagcctcgtaagccagcttgctcatctccctagctttcaccccgcattgacgttatataacaccaggactcggatcaaattatggaagctctcaagggcgcctccacaatgctggcggaacttcgcacctcatcgcttacaccagtacgtccggacctctccgaatcttccttgattgcggtaagcgctcgagtaacggttctatttggttttgtagaaacaatattatgagctgtgtgagcaaaagctttcagttgcatcttaacgattctttcaactgatcgtatgacgaggacacagacatgagcgtgttcgatgccctgagacacttgaccgtgagtatcgattgcgaatgggcggatagcatgacagctttttgagtttagcattctcgttgcagacatacctctacgatgcgcacgttactggaaagcaccatctggccgatctctacgagctagttcagtacgccggtaaggaatgactactatggggcgagatatgtgattgtcgactgatactgttgcccctaacgataggcaatattgtgtaggtctgagaaatgctgtcactgggctggacgttccagctgatgcagtacaactttcgtggttcagaccgaggctttacctgatgatcacagtagggtcgatatatatgtccatccccgaggcacccgtgaaggaaatcatgaaagatatgcttgaaatgactcgaggcgttcagcaggcaacgcgcgggcttttcctgcgtcactatctaagcggacagactcgcgattatctacctgtaggcgagtccaccgggtgagctctctttgttgctctgcccagctacaatacgactgatagtggcccaatcagcgcggatgggaatctgcaagactcgatagcgtttgttctgacgaattttgtagagatgaataagctttgggtacgtctgcaacaccaaggccattcgaaagaacgcgagaagagggaaatggaacgcaaagaactccgcatacttgtcggtacgaatttggtccgcctcagtcaattggaaggcgtagatttggcgatgtatcgccaagccattctaccaagcatactggagcaagtggtcggatgtagggatatcatagctcaagagtatctgatggaggtggtcattcaagtacgtagcatctaggaatcgaaaattatgacactacgacatttcgctcacaatatggttacgataggtattcaccgacgagttccatctccatactcttacgcctttccttaccgctactgcgcaattgcatccgaaagtcaatgtgaaacaaatagtcatatccttgatcgatcgattggcagggttcgcagctcgagaagccgaaaatgagactcctgaagagaagaaagctcaagaggaagagttgagccgaagactggcagaccgggttcgattaacacgtgaatcccagaaggaaaggacaggccgcgatgcagtagcagcgaaggagcaagcagacattatcagcaatctagcggtctctgcggatccagcagtgggtgatccaagcctcaagagtcatgaatcgaccttgctttcgaaaggaaagtctctgacaacgtcaagccatccgaagtttcgaggtattccggaggacgtccgcctattcgagatattctggcagcaggtagttcaactgatttctgtgagtgtcactttgtctcaagaagaggtcgagacctcacctcctgattgtccgttccggtgtcacaggtccggccggatcttagcgtccaagacatcactgccctcttggtatctctacttaatttggcgctgagctgctacccagatcgcttggaatacgtggaatacgtcctgcaattcgctcaacgcaagatggatgaatttgcgacgcagtcagtccagggcaaacccgaaccgtcctaacgataatcctaaaaggtcgtgttgctttgttagccccgaactattggcttctcaaacgactaccaatctcctatctttacttctggctccagtcaacacgtacgcatcggcgctcacgttgctcgccgttccgtcgtatcaaggtttactctctcagcaaccgagcgccactcgcgtatccattggacaagctattgtctcatcgattctcaagagcaacacttgcattgcatgtgttgaagacgtcaatggtatcttgatattgtgtcaggatctcgtcagagatgatggaggcgatcaccgttcccatcctgcaaatacgtccaatcgggcgccactttcagattcatcttcagggcttgccgaagagcaaggttggcttgcccggatcattcacctgttctcatctgacgatacggctgagcacgtctcggtaagtctcctctcattaggtttcaactcccctgctgactggtttattctccgctcgaatgcagctgcttgaaacagcacgagatcatttcatcttgggaggccggcgtatccaatataccttcccggcgttggtctccgcttcgctgaagctagcacgtagtgcaaaggatagatcaaacaaggtgagagatcagatgaattctcgcaagtttgttactaaagctgcgtgttctacaaggagcgtctcttacccagcatactgaagtttacgcatcagatcattctcagtctttacactcgcgttgaggcttccgagatcagccttcgacttttcctatcagcggctcaaatggccgatgagtgtcgcatcgaagatctcgcatacgaattctttgttgaagcgtttaccatttacgaagagagtatatcggagagtaacgcgcaattggagacgatcacggcgatcatgtcgacactgcaaacgtctcgtgtgttcagcacagaaaactacgacacattgatcacgaaagcagctcttcatggatccaagctcctgaagaagccacaccaagccgcagcggttttgcaagctagtcatatgtggtggcagaccgatatacctggacacgtcacaagcgtaagcgcgaatcacgcaagtaacggtccgcaggacgggcatttatgctcagaatctctcctttgcagaccgctttccgggacgacaaaagggttctagagtgtctgcagaaagctctgcggatagcaagctcatgcgtagatgaggcgtctagcgtgcagctttacgtccaagcgctagacaaatacgtttattactttgagcaagctcttgaagcagtatgtggcctcagtcatatcgatgtctccctgagctgatgcaacaataaatctaggtcacgccaaaatatatcaacagtctcacggaattgatcaccagcaatattgactttgccgtcgtccctaggaggtctaatgctgttcgacaggccgataggatgcgaggagactgggataccattcaggtatggctatgtcgtatcgaaatgtgaaaattgcttataaaccctatccattgcccctgttctgatcgctacagcatttcaagaacacactcgcgtacgttcgcatacgccaatgcgacgtggaagcgaagcttccatgggaagctatagagcttgagagtgctcagagaagacttgattcagcttgattggcgtcgataggagaacgcctgaacgtagaatgtctctaatacagaactttatactatggatacctcgatagagactggcacgggtacatgagggctatgtttgtgtcccaaggtctgcccagccgtaatgttctccagcttcgaaacgtcagcgtccgaaatgtcagaaacgatcgctgcctgactaccgagtgtcggaagtggcatatctgagctggctgctgggctattctcacagacgtcatcagaaacgttgtgcggctacaagctagatgtggactaaccgtcgtcccaaaaaccgaagggcggtccctttgagctgtgaccagcgtgccatatactcctgaatggcctcttctccaaagccgaaaaatacgaagaacgaaaaagagtataccggataaagatacacggttgtagcgtaggtggaatacgcgccaaggagaagatcttctggatattgcgatatcgtggcaaattcgatatgcacggcgtgccatgagaacgggttgatgccattcactttgacggacgaaatcaagatgaagagagtagcgaaaaacaccagcgatatatccgtcacggccaaggcaatgagacgtagatatcgcccagtgttgagtcctgtgcgagaagcactaaggaccgccttgaattgcagacgcctcaagaggaaccagcggaaagccaaagctgatgaggtggatttcagcgaagaaccgagtgagaggaaggccagggtacttacaggcgtagatagtggctccaatggctagcaataatggagtgactgaggtgatcactacattcggccaagacatatatgctggaatttggcaaccgatgtgttcgatgatatcgtagcgatgtccctgcgttatgtaacgaagggcaagttgcacaagaggcagaccaaagcagagagcaatgtcgagggcgatccgacgcgtccgggcgctgggggatgttaacaattgccttgtcgatgcaacgctttccaagcggcgcatctgagagaacaaagaggcgggaatggcgaccgacgccgcgatgaagatcctgccggctacggaagaactaccttgagcgacatagagctcgattcctcgccatcgggacagactcacaaatgtcgcaccatacaggacttcggtcgataatgttatcggcccaaagaaggctgttgacgataatagtcaagtttgtgatggatagccagaaaattagacccaatgtgctaatgtttctggcacgccagtgccaaggagacggcagtaagaccgctagcagtccaagcatagcacagacgggatatccaggatgccgcattctgatcaatgagggatgagccaagggttgggcgattgcttgctatatagctctgaccaatctgacacactcgaaggtatgctcttctaaatagcgaattttgtacatcggacgtgaatggctgcatcgaagatgttggtatttgcagcagcctttgtatttgtgaagccagatggaacctcatgacagcatgtctgaaggaagggagaacaaaaggatctcggtggctgtgtggaggtgtcatgggccgtttcggtaagacaataaaggcctagaggacgcgaatcgggggaaaactagcgatttgatctatctggagtttattgtagtatgaaatttgtgacatcactgacacaacaaccaaggtgacttgggagagtggtctaatccgccgtgttaaggttcatcaatgagtcccgcggtccttcggggcgtgagttcgaatctcacagtcatcaaactttttgccatccgggcattgcttctcctcaccgagattttcgacagcttttctttttcatttggtttgctttccaataaattcacataataatgtcacttggatcggaagcatgcattacatatattttgcgtacaatccgataattcggtcacatatattgattcagatgtggaccttgttgccgttacggtttggtctctttgcgccgcaatctgcgctcctcagagctgagtttctccatgtctaggcgcaagtgcacttccctcaactgagtcgctactagctcgaaaatcggacggactcgactcagaactatggccttgtattcgggttcgattccagggaagcatctagaacaaacggaccgcttcgcccagttctgagcaatgaagaattagcctatctggccgcataaggcagaggacttcaacagtgtacgatcggagcttacctctctgccgcaagagcatgtccaatctccagcgacgctgcccaaagggggctttggtatctgcttcaggaagggttgatcctgaatgcaacaccgtcgacatgtcaatttctagaaggaaatcggtgacatgcttacaggtatattgatcgacagggtcttccaggggttcaaagcttcctttccctgtgccgaacctcagcataagctcaatgcgaagtccgcacacgagcgaaccgcatcgccgtcttcctttccgtacgcacgatcaggcctttcatcccgagatccatacagaggccgacatctccttcaacgataacctccttcaagcctacaccggagtgacccagtcgcaaaagggaatccacgtgtttagagagcctgtccagtatcattgtaggagaaggatacatttcgtgaggtttcacagatgaatagggaaggcctcggatcgattctgtgacgatgtggttgcaatcgccagtggagaaagaagagaaatctcgaggttgatcggcctgcaactcatttcgagaagcgatcccagcctgagaatccggtagagggcagctggtaactcgtagaccactgatgaatacatgcttgtaaatttccgttcgaaggcagcggacgtacaggatgcagacggcgacatcgggcgtgtaggcggttccacacgattcacaatgccaatcggaaggatatcctctgcagaagaatcaggtcatgcacgatcggggagatatatggaagcatcgggtcgacctacctggagctggacgcagggggctccgggatcgtggatcgtaatggagaaatatccgagtaggtcgcttgtatctccgagcgtatcgacgatcctagtgatctttgcgagcgaaggtgcagaccgggccgagcgaacgggaagggacgatcaggtgagcagaaatgtaaatgaggcccaacagacgaattccgatctgacgccctttgaggttcctgagggggacttatcgtgcttcagcggcaggtggtctcatttgcacaacgaggaaacctcgtgtagcttactgcggaagattccggcacctcggtccatctttctccaggcccgcgggtttcacggtcaaacggttggccagcgccatcgaaagacgtatgatttaggccgcttgtgaagggagtctctttctataaagcatcgccgcaccagattagccaaagccttcggtaacgggcaataaacgcacgatccggaaatgtctttgggctgcagcaagttctttatgagaatccttgaacggggtcggattgactcgcgactgaacgggcccggcttggggaagttgggcatgtgcattggagtatctggtatcctgcactttgaactcgcgagcctgagggttgagcctttggcctgtgtcgcggttgaacgccattatgaccagtttaaagatcttttgatgcgggatttcgatgctgattctgacacgcgactgtccgatcaaacgtgcagtgcctcaagtgctgatcaggcagtgtttcgcgtatactgtcagaacaattggtaagttgaggtataatctagctcggtgcaacttcactgcagatcgtctgactttgctctcctcaataaccgcgcgaggatcagtggaaaaggtctgggcgaaagatttgctatgctagatttagacaactcagctcctgaacccacgacgatagtcggattgtgcagcagtggcgtgagatagaaatcctgtgtggctcctaggagcaacacagtctcctctctgcgtagtggatattgcggaacgtaccagctgtaggtcacgatattgggttcgaagaccagatcgacggggcgaaatcaccagagcactactgttgcatgggaagaaaacggcttggggaggtatgccatgtcccttttgtgtgatcgatgtataccagacttgaacggtcgagcgacttgtgatggctatccgcatgctctatgcgagggttgttgacaagtgagacaattgaagcacactatggtctgtttgcagtttgatgagttgacgtccgattcttgaggcgctcaagaacgccgaacccgccattacgtcatcagtcacatggccatttgcaaccggcactcgcgaacgagagataagcatcttcgcactgctactgtcgatctagcgactacttaagggacagacttaagggacagcggaacaggcctgcaggaggaaaggacagaggacatagtgtgattggcaaagtgtacgcgtaagaatcaacgcgttcgaatgctgcagcgtttgcgcatggcattgctgatgtacgtgagggagacgacaaggctggtgagcgggcccagaggatttggcaccaaattaccgattacacaatgtcccgggacttgttcattgcgctcttcctgacccgtcattcgacatgctctacgttcgctgatcggttttggacaggttctgaattcagcccgactgtcgcatctctgttacagaatgatttcaactaagcctggacaacttatttttctgctccaaagtaacgagccatctcatgctgtatcatggaaatgtaagaccgtgagtcccgagcaagaaaacacccctcacaggttccacactcacgatatgatcccctgtatagataggacgctctgacggatcagtatcatgtcttctggttaggccttcccgcggcgaagttgagaggccgtccgtgcggggggaagctattgacgacttccaccatggagcaggatcgttttggttgcactgagcggctgtactaccctggctatgtaattgcgaagtcaacatgccgggttcaggcgcactggctgagcgattggcagtctggggcgacttcggcagagcgagtgggctggacggtcgtgcggcaggcaacgtgcgtgccaccgtcgattgcatgaagtgtgtcaaatttatacgcttcttgttggtgcgcgactgttccttggtcgtgtcctgctgtgttgtgtcgcgtaagtcgatatcttctggctcagatacatggtgtagcggcatcaaagtgctcgctgatgcagattcgattatagtcggactttgcatgcccgcaatgtctttcgatttctcgagcggaaaacgatcagctggacaatccatctcatcgggctggaatccattacgggtagtagagctcgtcatttgggggagacaggctgtcctatctaatgtcccttcaagtggtcccgtttccggcgacgaacggtcggccgtcacggggcagttgggtgttggaggcagagcattcatatggttgactcgactaacgtcaagcaaatccgactgatcatgaccgtcagtgttgtcggtcaaaggctcagtcaacgttgacgttgccgacacactccgacggtcctcttcctcctcgaaagcgttgtgttcgaatacggatggtgttctggctcggacttcgctgtatgccttgtatcgagcttcagctaagtctggattcgttatgaggggcgacgacatccatccatcagccagtgaatcgggataatcggaatcgtttgacgattccatagacggttcgactgagctgttgtcatcttctgtgtcataggcgtagtgttgggagcctaaccatatgcccaaatgataattggaagtcgacgccagtacaaggtcgttatctgcagggctgaatctgtcttgccagacagaaggacaagacgtaaggcttgctctgaggcaggcctcgtaaccatcgtaagatcctgtgcgtagttttgaccaagaattgactgaagttccgatgacggccgctcgattacttccgcatgcgaatgacgcatactcctggtggagcgaggtgccgagcagcttagcgacaatgcaggcttgaacactggtgcaagcgcaatcagtgaggaacttcgcgagatgatcaccgatggcatcgagacgttgtgaatggaagcttgatggtcggatctgctcctgcagttgatggatgatatggttgtcatcccactgccaaggaagcgttacttcctcgccgacctgtatgtttctagttgcgaagacaccgaaagaagttgggtcgatcacttccccaggtcgagcttgactctcatgtgtcatggacgacagacatgcgttcgggtgacaactggaccgcgtgaaacgcatgtctgtgccgtaacgccttgcgtcgatcacaatgccaaagggtggcccaattctccgaacgaatgctttgggtgaaccgaagagcgcatattgattggcagggtcattctcatactcgctcgcagaatagatttcgccgcaatattctccaagaaaggcacctgcaccaatttcgcgccgggcatagacgccgtaattatcagggttgtagaacggccgtcggagggaggggtcagggcttgcgtgaccagcgagctcaggaacagatatctctgtcgcatcgtttttcttgattagcttgacgaatacattggggtttttcttcctatccgcaggttcgctcaatggcccggtcgaggtcgcggctctgtaatagtcagaaggacccggtcgaggcttgcgcattgccacggttcttttcgcgccgttgtcggaaagctgatccaaacacaatcgatgaagcgtgtcctccacctcgtggctagtgacgaggttacttagtatcggtatgtattccaagagcctgagcggacaatccgcgtcatctaggctgcgatgcggtctggcgtcgctcaaaggtgcatcttgtggagcatcttcaggtgcaacgctcacttggagtgtagccttgcccttcgagatgcgaggggcaatgatggatttcttgcgctgattccgaggagccacggcaggtagaacctcgctactgggcgacatggctttgcggtcactgccttccgtttcggtcggcttcgtggctaggccgccaccacgaactcggctcttcccgccccgtcctgtggaggaaggcagacggggacgcttgccttctctctgaacaacatcgggtgccagtgacggttccaacgatgcgacatccttattgagagcgagacgctggatgtattcgacgtatgatccttccggttggtgaaactcatcctcatcgctgcacagttggcagaagtacgaatgtccttccagttcagactcgcgaaggccaaaacaacccgcgtgctgccaagcaaggcaactttcgcattggattgaggtaccagcatcaggctcgatggtcgttccacaaacacagcgatataattgattgtcgaaacccataaagtgcggcaggtcgggtctcgttcgagatgacggaacagaagccggtaacaaagcttctccttctggtaggcttgatgtgcgtttacgtttgcgagtcggagcgagcgaggcccccccaatgtcacgttcatcaatatcgaggtcgaccggatgcgtgccatcaccctcaacgattgtgcaatctgcaacaggactccctttactcgcagaaacgacggtatgcttgttaggggcatcagagccctgaggtccggtgtccactgacccatcaggaagcccctgatcgaatagaccgagcagcaacattgccgcctcgttatctggatggcgtgagctggtttgcatattggagacgggatgcgcggatctatgaggggcagcattcaacagcttatgtgaggccaatgtcatcgcaatggaaagtcaagcccgttcagaccgacctttgggcacatcgagagccttccaggatcagatagagataaaggtcgatcaaagtctccggtttttagttggacgatcaagacattccggcggaagccgcctggatgatttcccgttggagctgtggctgcccagctagctgaatgcgaggtggctcttgtcaggctggatcagtagatccgctccaccgcttagtgtgaaagtgacagtgtgaaagtgacaagttcaactggtaaatcgctaatgctgaggattcaccgtgtagtaccgggtgagcaccacacgatttgaattaactcatgtgcgagcgccaagcttcccgcccttggataccatcaaagtagtagtaccctgcaactctactctacctctaagcctttacattcactactgtctgcgtggtggtactttctgcggatgaaggccgattgcgacgcgtaaattgacgttattcttttattcgggcttctcccatttcgccacttgagggtcgttcctgtgtggtgtacacgactcccgacgttaacagggtctgaggacaacttaagttcctacgatccgcaaggcgtatttgagatcccgttggggtgtaactctacaaggaacatcaattagacaaaccatcttcgacatattattgagcctgcaaaccttttaattcggcgacctcgtcttctgtcacttccgatttcgagcctatctcggcctcgtctttcgtacttggtgcggccggtcgcattgttggagaactttcaaacgatacaaaggcctgtgcaatccaccgatcaagatgccgcctaaacgcgatctctccgagttcaattatggggctatgagcagtctggttgtgaaccaaggtgtgtttccccccctcttttggatagcacggtgtaactttggactgatgtgttgacacccatgcttagagagagggcaccgtcgagacaatgagcctaccggagcaccagaatcccttgtcggcagagtcaacatcaaggatatgggcgcgagggcagggagagaggctccgaaggacttggagaagaagaagcaaaaacaacttgcaacttctgcagcagacgaagcagaacgtggcattcgtcgtcgaggcgatctgagctacagaagtgacggcagatatgtcgacatactgcaagccacggaggaccttgagggactgaattatcgcccaaaaactgctgagacaagagaggtatttgagttgctcctcgggatcgtgcatcaagcactcggtgatcaagcacaagatatcgttcgatccgccaccgataccgttctggaagtactcaagagcgaggacgtcaaggaattcgatcgcaaaaaagaggttgagaccatcacaggccctatcgacggagatcgatggagtcatctcgtgaatctttcgaagaagatcacggattacgcacaagacacgggtagcaatgaggttgacgatcttgatccttcagctgcgagtcgggcggtcgagggcgaggatggcgttgctgtgctctttgaggacgatgaggatgaggatgacgcagacggggcatacgagctccgcgacgaagatagcgacgccgaggcatcgatggacgaggattcgcaaaatgtgctcgaggacgatgcagtcgcagatgctgacagcggggatttcggcctgatcatcggcgaagcctctcacaagcaacggaaagatagacaggacgacgtcgtggccccgcatgatgtcgacgggttttggttacaacgactcatcacatctgcttatccggatccacaacaagccaacgaattgaccaccaaaaccctcgaactgttgtcctctgacatggatcttcgagatgtcgaaaactctcttgcagaagtttacggttacgcacatttcgagatcgtcgcgcttttgacgaaaaatcgcgatactgttgtatggtgtacgaaactggccagatgtgacgacaacgagcggcacgatgtggaagtcgctatgcgtgagaagggtctaggttggctgttgcgagccctcgccggggagcgatctcgacccggcgagagtgtcgtcagtcgacctcaagccggagtcaacaggccggaagcctcaatcgcagcatcgcttcaaaccgacattcgaccccagcggacagtcgatatcgatgggttgatgttcgctcagggaggacacctcatgtcgaacaaaaaagtcaaattaccgacgggtagtttcaagcggacaggcaagggttacgaagagattcatgtgcctatccctgagaaacgaaagatatccgccgaggagtcacctgtacagattggtagtctacctgcttggacacatccggtttggggcaagaccacgcagctcaatcccgttcagagcaaagtctttccaatcgcctttgagagcgatgagccgatgcttctttgcgcaccgaccggcgccggaaaggttagttcaaatttcgttcgaaagtggaaaatcgtaacttgatcctcgaatcttccatattcaatagaccaattgcgccatgttaacaatactgcgtacaatcgggcaattcagggacgaggcgagtggattgatcgacctcgatgcattcaaggtgatctacgtcgccccgatgaaggcgcttgtacaagaacaggttcaacaattctccgctaggcttgccccgcttgggatcagggttgccgaattgacaggtgactcacaaatgaccaagcagcaaatctctgagacgcaggtgattgtgaccaccccagaaaagtgggatgttatcactaggaaaaactccgacacgagttacaccaatctcgttcggttgttgattgtcgacgagatccaccttctgcacgacgaccgcggtcccgtcgtcgaaagcatcttgtcaaggacgatccgccggatggaccaaacccatgaagacgtgcgcatagtagggcttagcgccacattgcccaattataaggatgttgctgcattcctgcgggtcgacgtcaagaaagggctgttttactttgacgcttcgtatcgaccttgcccgctccgtcaacaattcgtcggcatcaccgagaagaaagccatcaagcgcttccagatcatgaacgaggtctgctacgagaaggtcttggatcaagtcagtcaggacaacccggtcatggtctttgtgcattcgcgcaaggaaaccgcgaagactgcacggttccttcgcgatcttgctctagagcgagagcagcagacgcaattcatcagtccgaatggtgccagccgggcggttttggaggaagagtctgccaaagcgcatgatgccaacctcaaagatcttcttgcttttggatttggtattcatcacgcagggatgaaccgagaagaccgtgcagtcaccgaggagctttttgcggaacgacacatcaaagtactcgtctgtactgcaacgctcgcttggggtgtcaatcttcctgctcatgcagtgatcatcaaaggcactcagatctacaatcctgaaaaggggcgttgggcagaactatctcctcaagacgtcctgcaaatgctgggccgagctggtcgaccgcaatacgatcaatacggggagggcatcatcattaccaaccacaatgaactgcagtactacacaagtctgctcaaccagcagctgcctatcgaatcgcaattcgtgtcaaagttggttgacaacctcaacgcagagatcgtccttggatctatcagaaacagagaagaagctgtgcaatggctagcgtacacatatttgtgagcttgaagatcatgccttccttctcacagtcgagctgacttattcggcgcttcctcctccgtcaagatatgtacgtatgctggcgtccccggccctgtacaatgtcggcgcagattacatggacggcgaccctgctctcttacagaaacgatgtacgtcgccgtgtcgacctggttgtctgaactcatactaacgtgctgccttctcagctgaccttatccatactgccgcgaccatgcttgagaaaaccagcttgatcaagtacgatcgtcgaacgggcgtcttcaagagcacagagctcggccgtatcgcatcgcattactacatcgcacacagttcaatggcgacttacaaccagcatttgcggcccacgatgaacgtgatcgatatgttccgcgttttcgcgctgtcaaacgagttccgtctgattcctgtccgtcaagaggaacgggtcgagttgaccaagttgttggagcgggtacctataccagtcaaggagaacgtggacgagccgacggccaaagtcaacgtgctgctgcaagcgtacatctccgggctcaagctagacgggttcaccattgttgcggatatggttttcgttcaacagtctgctggacgaattctcagagcaattttcgaaatgtgtctcaaaagaggctgggcaggccccacgaggttggctcttgacctctgcaagatggtggaacgccgaatgtggcggtcgatgacgcctctcaggcaattcaaaggaatcccggcaaatgtcgtatacaaggccgaacggaaggagtttccctggtacagatatttcgacctgcagccagcagaactcggggagctagtcgggcttgcaaacgaaggtcgtcgtctccaccgccttgtccatcaatttccgaaaatggaattgcaagcgctggtgcagccgatcacacgctccttgctacgtatcgtcctcacgttgatgccggatttcgagtggaacgaacagcaacacggcaacaaccagctcttctggatcctggtggaagacgtagacggcgagaggatcctttaccacgattccttctcgttgaggcaacgatatgcggaagaggaacacgtggtgacattgtcggtacccatatcggatccggtcccgcccaactactatatctcggtagtttccgatcgctggctacactccgagactcgtctgccgctatctttccaacatttgatccgcccggaaacgttccctgcgcacacagctttgcttgacctgcagcctttgcctgttcaggcacttcatgacaaggactttgaagcggtttataatggaagcttcagtcacttcaacaagatacagaatcaggtgtttcatgctctttacgcgaccgatgacaacgttatcgttgctgccccgaccgggagcgggaaaacagtctgtggggagttagctctcctccggctctgggccaaacccgcagcccagagagctgtttgtcttctaccctatgacgacatggttgaagctagagttgactactggcagggtcgtttcggacgtatcaagggcggcaaagttatatctgcgcttacaggcgacaccaccgccgatcttgctgtactgcgacgatctgacctcgtggttgctaccccagctcaagtgagttcttgttctttctgttccgctacacaccccgtactgataactctgatcgtccgcagtgggatgcgtgttcccgcggttggaagcgccgcaaggatgtccaggaaattgggttattgatcgctgatgatctacagctgataggcagtggagacgttggtgccacttacgaggttgtgctatctcgaacccgctatgtctccgctcaaacggacgtgccgactaggatcattggtctcagcgtgtccttggcaaatgctcgagacattggcgaatggctaggggctccggcttccacggtcttcaacttctccccaaggtatgctatactaaaacagcaccttaaaacaagaaactaactgccccattctgatagcactcgtccaagccccttagaggttcatctacaaagcttcaatgtaccccatttcccctctcttatgctctccatggtcaaaccggcgtatctggcgcttacagagatggctgagggcaagccttccatcttgttcgtgccttcaaggaaacaatgcaagatgactgctagcgacatcttgggatactgcctagcggacgaaaagcccggtcgattcttaaatatcgaattagaggaattgcagcctcacctcgaccacattgatgatcaggacctcgtcgaatgcttgaaatccggcataggatattaccatgaagcgatgagcaagccggacaagcgcatcgtggcaagcttgatgaacgccgaagcgatcaaggtcctcgtggtctcaaaggtgaatacaacagcaaggtaaattcattaaggtcctattcaatgattaacccatcttttcccttcctcgtcacaggattcatcatggagcctgcccgttactgcttacttggtgatcatcatgggagtgcaaaactacgacggccgggagcaccgctatgtagattacgccatcgctgaggtcttgcagatgatgggcagagcatgcaggccgactgtggactcgagcagccgatgcgtacttatgctgcagcaaacgcggaaggatttcttcaccaaatttctggccgaagccttaccagtcgaatcgatgttaccaggaaatctctgggaccatttcaatgccgaaatcgttgcgcgcactatagaaaacaagcaggatgccgtcgactggtgcacttggacatgggtgagccatccggatggcctggttgcgcctgtaccattgctgaactcgtctgatcagttctatcgtcgaatgacgcaaaaccctggagtaagtctgaatcgggttgatatattgtcggaccgctactcagtatggagccgattcagttctacaatcttcaaggaaccagccaccgccatttatctgaccatctcagtgaattggttgaaaacaccttagcagatttggcggacaagaagtgcatcacggtcgaaggtacatgctcacatcgcgaatgtctatagcgagcgaaatactgacgatgagacttggcaccagacgatatggacacgactgctatcaatctcggaatgatttgctgtcagtcaatcccgggttcaagagttcgtgcttgttctgatgtctccggtcacagcgttctactatatttcgtatctaacagtggagacgttcagtctctcactgaaggagcgaaccaagctgaaggggctcttggaaatcgtagcgtccgccgccgagtttgagaacatccctgttcgccaccacgaagatatcctactgaggcgcatatacgaacgcttgccagtcaagcttgaaaccgtggactataacagccctcatttcaagactttccttttgttgcaagctcattttacccgaatgaatctgcctgcggatctggccatcgaccagaaggtggttctcgcaaaggtgtccaacctgctatctgcctgcgtcgacgtcatgtcctcaaattcgttcttgaatgcccttggagccatggacttgagtcaaatgtgcgtacaggcggtttgggattcggattcggcgctccgccagatccctttcttcgaacaagatgtcgtctcccgctgccgagccgcgggagtagaaaccgtctacgacatcatggaactcgaggacgaccggagaaacgatttgctcaaatttgatgacaggcagatgtgagccaatcagtccgagttgcgtatgatcggataacgaacgctgacttatctttaccgaagggctcgcgttgctcgattcgtcaatgcctatcccaacatagaggttgaatacgaaatggaagacgcccaagagctggttgcgggagaaccgatatccatggctgtccgcctcgttcgagatgtggacgaagacgatgacggggaccagattgcggatgcagcccgttatccgggtcggaagctggtcaactggtggctagttatcggcgatgctgccagtcgtgcgctatacggtatcaagaaggtcacggtcaagaacagcttgaagacaaagctgagctttacgttgccggagggctctcacaatttgaagctgtatctcatttgcgacagctatgtcggtaagtcgcatctcgttcccgatgatcctcttcgaccgtctaaccagatatttgctttttcacaggcgcggatcaggactttgacctggaaaccgtcatagtctctccggctgagaattcggattccgaagaatctgacgacgagactatggaggattgagctggctctgctacatgctgtgaagttcgagcaggtttgcgctttatgttttacaaatactcctgtttgtgttctgtattctggatgcaatttgcttttaaagtcgccgagatcgacttattttatcgaatgatattccgtcaggtatctgtgcaaatttgaaacggcagcaccgcagacgcctggtcaagatcatcagcaagtatgcctggaagcggcgtcgtccttctgcatgaagagagtagtaatgatggctctgctgtgtcgatcagtcagtctgggggccctgagagtaatgagttcaccagacacgacatgcacaacgtgacgctgcactcaataacattacgcctacaaggtatataagttacagaattacaggtttctcgaaattcttgccaacatataagtaggaattttgtttttcccttgccttgtgaagtcgcaactacgcaactacggagctgtggatcacgtagcacgtagcacgtaaactgatgcgatcagtcctggcgagtcgtttcgggctcatgcgtccatcaaacaataacaataacaacaatcgttcgtctcgaaataccgttgcctcatgcctcatcatcagctcatcagcaggcagcaggaggtgcagctgatcagttcatcaaatgatgaccttactggttccccgactttcaacggatagtaaaagccgcaatcgtagtcgcaaacgaaatctgggtcaatgggtcacttaaaccacggtcacatgtgaaaagtcctgtcacattcttagatccctggccatcacatctgctggatcttgccgccaaataaacaacacatcgcaatgcattcgcaagagcgtcgttgaattatacctgaattccttacgttccgtatagtcatcgcaataatcgaagacacgtaccaccagtgcacagactacattgggatactgagatcccacacggcccgaatacaccatcacgtccaggagcgtctcgaatcatcttgctcttagaagcaggccgtgtcgagagatccgaaagacacaagtaagtgcattgacgattatgtgatgccaggtcaggcgaagctcacatttctgcagcattataagccatgggcgtggaactaccactaagccaggattgcagcgattccgttgcgctggattccccctttgcccaactcgaacagcagtcatccaccggacagatcaaaccatctcaccaagatatcgcaatgaccatggatgctctcaaaacacagccgagtacgaccttgcctggaatgtctagcgagttaacgggtaaagagatgcaatacacagctccaatccgggcgcccgtgtctgctcatctagccaaacgtgctacctatgatccacggatgatagcacctctccggatgaagtcaagttcggaaacggcatcggtctctgattacagcattcattcatctatatcggcttatcagaaggctcatcctcgacgaccactcatcaatttcggtccttacatcctcttgcaaactttgggagaaggagaattcggaaaagttaagcttggggtgcacaaggactacggagaggaagtcgctgtcaagcttatccgtcgcgggagcgttgacactgatacgcggctgaccaaggtcgaaagggaaatcgatgtcctaaaggtacaatacgttcctccgagcgtatcccttctatatgctgaatatttgcggtatcgggcaggctgtcaaacatcctaatatagtgagactgttcgacgtgattgagacggaaaagtatatcggtatcatcctggactttgctaacggtgagtcaagaataaagtgtctagttcttgcatcaacctgacttggcggccacgaaaataggcggagagctgttcgaccatatactggctcatcgctacctcaaagaaaaagacgcagcgaagctgtttgcacaattaatatctggggtgcactaccttcaccagaagaagatcgtgcatcgcgacttgaaattggagaaccttctgctggacaagcatcgtaatgttatcatcactgatttcggattcgccaatcgcttcgaacacaaacaagacgatttgatggcaacatcatgtggtagtccgtgctacgccgctccagaactcgttatctcggagggtctatacgtcggatcagcagtggacatctggtcatgtggagttatcctctacgccatgttgtcgggatatcttcccttcgatgacgatccggccaacccggatggagataatatcaatctgctataccgctacatcgtcaacactccgcttaccttccctgattatctctccagcggcgcaagggaccttctgtctcggatgctggtggctgatccgctcaatcgctgtgacttggaatctattatagcccatccgtggcttcagggttacaggcctttgttccagcgtaacgtctgggagctggaatccatagcgcaagaacaacagcagcataagcgcttgtcatcgcggaaggctatgcagctccgggtccagcagcaagaggaactccgccttgatcgcttggctcatcaccacccgaatgctaccaaatcggcgcttgattgtggttcattgaacaacgctggtagatcgacacgtcaccaaagcgttgcgccatccgctactcaggtcggtcgatgaatcgcaatgggacacgtatcggcaaatgcttactcatagcgcccttttgtctgaaatagctttccccgaccgtaccgattgaagttaccaaacaggcccatcccaatacgcctgggcctgatctcgaagtatcaccaattggtagcctcccggtcggcaatatctctggcattgcctctcatgtgaccggctccaatgtcttgacgggtaatgtcgctaagcagcacaaccggcatacgatacaggtggaatattcggtgccggctacgcgagaactcaacaaatcatcgctggaccatccgcaagggctactgcatcggttcgaaggtaacgaaacagagccacgtcatctcttgcttgaaacgcgagaatctactgcgctcttgccatcagactaccaacctagcgacttacgtacgctgcctggcaccgagtcggatgaccgatctagtagccgcttgcagcccaatcgacgccaagaagctgccgttccgactgtctccacaaaagagccccgcaacgagccaatggtctcatctgtctcagaccacatagatcatgacctacatgcatctgcaactttgggggttatgggtgaaacggagcctttgagcgactcatacccgcaaaagacagtcagcaatgcctcacaagcagggaagcctctggccgctttccgggatatcgcggcaaatccttcgcttacactagcttcaaccggtgcgtctattggattaaagcatttagcgcgcaaattcctgacccattggggtttctttcaaatacgcacaggaagcaaagtatacgaaactaatataaacgttagccatgtttctgatgcctctcaagtaacgaagctcggtgagtatcgtggatgatgaatggtcatgcccatgcctttgtaacgaccctaaagccttggatacattagggagacgacctgttggaccgatccctccgcatcatcgcaaaagcgcgtcaagttcggccgcgaaaaaagtcatggattggttcaggaggaagggatcctcccgaacagcccaatccggccacacaagcatctccaagaactcgcacgttgagcacggccagcacgaagatggtctcttagcccctggggttatggtgccttccgctgcatctttgcgcgtcgaggctggctgtccttcgctccctgctcaacatcgcccgaggttggaagaaaccgctcagccctcctcggtgacggtgctttcaagcgatcgttcggcgatgatgggccctgacacaagctcagcacagccgttggacggatccagtactttcgcatctttagaggaaggcatgctgcgatatcatactggtatcgttgatcaagcaaccttgacgacgatgaatccttctacaatcatggaaaaggtccacaagaccctaaacgatatgggaattgaagcgaagaaggaaggagatgccaaactgcgttgcgtgcgcttgcgacatgtatcattgccctcgtctaggaatggaaatccagatcaaagtggtcttagtatggtgagtggaacagttttcgaagtatgtgttttgtatacgttgttgagatctacgtcagcagaccatcggtggagaagctgtcaacagtgacgagcgtcttcccgttcaatcgaccagtcttcgctccctattagctaggagggccagctcccatcagggacaacaggggcctgctggcaggacgtcaactccactcatggacgtcgcgcatgccattgtcaacgggggctcgtccattctgagtccgcgaaagggagataacgggcgcaatcagaggtccgttcgataagaaaaatgactgcaagaaaggcgcttaccttttggctgcggacagtgctgatcacggcgacgagatacgcttctccgtcgaactcacgcgactgcgtaatcttccagggttgctttccgtcgacgtcaaaaggttgcgtggaaacgtctgggcatacaagctggtccacgatatgttgatcgagtaagtgacgacctccgaatcgcatggcagcggattctgaccaatatggcacttcaggcgatgcgggctggcggaacagatcggactcccttcagctcctctgtaggtgtccctagctagctcgtggtttcataatgaagcttttgcggtgtactgtcctggcggaatagattccattgataccccttactcgagatcctgtattgcgatgtccagcgatatcttccttgccttttttcggtggccgaagcaccgcgacggcaactagctgtagagcaaagcgattcacaagtaacgtgaaagcgactactcaagagatgcaccagacgtccacaggaacatcgcctttcaagacaaatgcatcgatcttgtcactaaatatatacatccgtcgtcatgaaattcctcccagccgtcaacccaactttcataacttccgttccacgaccgaccgaatgtctcggctgttcacaaactgcgtgtatcatatgttagtcgagtacctcacgagacctttagaaacggtaaaggacttacccctgatgttcaagcgatgacacacatgccgggtccgattccgctccacctagcggcgcgctcctcgttgacgggaggcttgttggcgacaacgcacatgccgggtccgattccgctccacctagcggcgcgctcctcgttgacaggggtggtctcggtcttggagatggaagaggtgaaggtggcggtgaaggcgtccattgtaagggagcgtgaggatagttcttcggtggtaggatgtaaaggcttgtgagtagtagagttgtgagaatgatcaatcccttcgatgccaaaaagatgggggtatacttggattggttgagccatatatatactgccaaagaggggtgaagcggaccagagagaacaaaacgacatgattgcagcaggggcctcatgctttcgcttgtcgcttgacgtcttcgcaacttcaactctattgttccgcacctgcgcttcccctgaacgcgagcacgtcgaacaaaagagacgactgagcgagacaaaagggagcctcataggacacccttgaatacaggccttcaacgtgccaactgcatcactggatcactagaacaaaggatgactcacacatgcacgtatgtgatattgtcggccgcgatcggttgtctaatcgatttaatcgtcagtcatcggaaaaagcgaacaaaagagattcaaagcgggaccctgcaagcgcatcagcaggccagcaggaagcatgggtctttgatggaagccgtgccggacgattgacgttttgccgcgtctcgcgcgtctcgcgtgctccattgtctttagttccgtctaagtctaggctctattgtaacatcccgtacgaatctccaatcatgccgcagcacgagagtagcaaaacataagacgtcttgagcgcatgccaacctttgttctttggagattttggacctttgttcctcgcttttttgttcggtttctgccaaattcgggccttgccctttgtgattatgccttttgttctttgtctcggttctgcggccttagtcttttgatccaacccttgtttcagtgagtgtcttttattgccccactgatattgctccccagctagcctgttcctcgcatcccttgcaatattggcttctggtctctggttcgaaaatcacacgtctaatagctgctgaaatgcgtcatcttctttgaccctttggcggaagcgggaaaatacctcaatgtgctacaagtcccgcatcagcactcggtgagtgattgttcaattatgctcgtgcttcaaatgaaatgttaatgactgttgtcgcaatatgtctttgccatcggggatattcctgtgcgctccgccccagaggtgtataagagacagggggagggggggtggctaggccttgatttcctcctcatccttttcatagagacacgatcgtccatctctaagttggggaaaggtacaatgagactcaagacctcgatgacgttctcggtcgatgactcgtcgccaagggtcatggttcgacgaacgcctcgacgaccttttgcaacgagcgcctcgacgtcgtcgttcaagttcacagcgggaccgatatgaggacgcgtccatccatatcgtggtcgtgtcgatcctggtcgctccgtacttccatactacaatacacctcgcctttatggagatcgtgactcttctcgatacgtggatctcccatgagtatcttcccggatttcgaggcgtttctgcaccactctccgagcccccgactttggcgaatcctcctgacgggaggccagggactcgatcatataacatgtgtccatgtcgaaaggtcttttgaaaacctacgcaagtgtcgatacgttcgagctacagaaggtggggaggacggtgagtggagctcgtcgcggcgaaaagtcacctcgaaaagcagcccaacttaaatcgtcgcgctcagctgcgtgcgtgtgtcaatactcgtggtttgaccatcggatgactatcacgatgcaacttgtataactctgaagatctggaatcaggaatgaccttagatgttgttaggtccagaaagacggagggtgctcattcgtaccagactggtcatccgcgagggctgcctagctcttagccccctgcgggaatattcgcaagtaaagtcggtcgtgattcgaacacgcaaacggcggcgaacttgttccatctgttgccggtcgatccaggcgaaccactggaagttgatgatgaacctcctgaccaactcgtagaccatctggtcacagatgcaaaagaccccggcagagaaccctcgtcgaccatcgctgaacgatcctcgtgagaaggaatcgcagcagtatggaagcttctttcatgccgtcaattgcgacttctacaaagttaacactggctcaagatggttctttcacggtttcgaaaaagctggcggattgaattcttatcgctgatcgctgatcactcgcttgcttcatttcataagctacgatatcgcccactcttctgatcggtttcctttgcgctgatccagatgcgctattgtcaccagaacaagcccaaatcgatcattttgctttgagctcgccaacgacttcctcctcacatccgcccacacggctgcctcctcgactcgacaggcaacgtttgccacctgttgcctgctcagggtctcttcagatgatcgattgtggcttgaagtgaatctgacatcattccgcgcgtaaaagcatgacgtactcgactcgggagtcgatcgccagcagccagcagccagcaggtcaccctggacttttcttggtcgaatttattcttctcccctcaaccgaccacatcgccccggtcttttcgctcaagcaaaatccactcgagataatccagtagattcgttgaaaatgttcagatccagagccgctcctcttgcaaagcaattcgccggcgtgagtctcgcgtccgtctcgatcggacgagcttaggcttttttagctcactctaccaatcgctcgattgacaggctcagcgccaggtgctcgcaaagcgaagttatgcttctcccgctgcaggtggtggtggtagtgagtacatggtatttactggcggtaaagccggtcgcacgatcggtgctgacggacacgcttttcgattcgcttgcagacatgcctctcgttctcggattggctggtctcgtgagccgatctcaagagacacctcgatggttctaatcaaactgacatttcatggtccgcatgacgcataggccggtctcggaggttacgtatacttgcagaggaacccttgtaagtcgagtcgtacccgggtctgctagatccgcatgctgacctgtcgtctcgcacatccagccactcaggccgccatctctgccaacaagaacgaagctctcggacgagccgaagacgctgcccaatcgttgaagcacaaggctcaggctggtgctgccgctctctcggccaacgcccacgaggctctcgaccgaggcaaggacaaggctcagcaggtcaaggacgacgtcaagggacctttcgacgaggagaagaaggctctcgggaaccccggaagcgcccccgtagaggccttgatcaagaacagctgggtcgacttcaagctcgagaagattgagccttacaaccataacaccaagatgtgagtttgacggcgatcggtttcgattcgttgcagccgctgacaaactcccgacacgctactttccagctacaccttctccttccccgactccgagtctatcgccggaggcaaggtcgcctcggctctcttgaccaaggcatccgacccccaggccctgctcgatgacaagggcaagcccgtcatcaggccttacacccccatctcgcaccacaacgacaagggaaccttgaggttgctggtcaaggagtaccctgtgagtggccacgcttaccgttggatcgatcaagccaacaagaggctcatcttgccaatgcttttctcgctgggtcgaacgttatagaccggaaagatgtccaagcacattgccaacctgaagcccggcgagaccctggccttcaagggacctatcatcaagtacgagtacaagcccaacgagtttgctcacggtgtcactatcggaggaggtcagtcgatgcgctctggtagactattcccgatgtgcttcggctcaccgtgtgtgactcttcaggaagcggtatcacccccatgtaccagatgatctcgcatagtctgtctttgcccgaggacaagaccaagtggaccttgatctttgccaacgtcaccgagaaggatatccgtgcgtgtcatcgagtcttgtggccataccggtcagacccgctgaaacgtcgatgtctttgtctcgtcgactcatagttttgcgagaggagtgggacaaactcgccaagcagcaccctgacaggttcaaggccgtctacaccttggacaaccctcccttcatgctctggaagggtgagtgccgataaaacgcgcgtctgcacgtttgccgcaggaggctgattcgacgaccgtttgctcgagacaggcgagaagggctttgtgaccaaggagatgatctccaagtacttgcccagcgaccacaacgaaaaggccaacaccaagttctttgtctgcggaccgtgagtgtcgggatcgtccgtgcgcgtacagactataattttgacgcgtgcgatcgctacacactctagccccggccaatacgctgccgtctgtggacccaaggacggcatgaagcagggagagatcaagggagctctcggcgagttgggatacggcaacgagaacgtcttcaagttctagacgaacagcgccatgggaatgtttccggcctgactggggaaaatgaatgcaacacgacttgtcgaaatcaggagcatgcaatgagaatctgattcgttttctgcggcgtatatatgacgaggtcatcccccgttggcctggtatgcttcagtatacaacgatggtccgattctttcaatcacttaggttcccagctgacgccgcaaccgcagttgccaccctctttcgcctgtgggttgtcttgcagtcggaaagagctaccgatgagctctgtagcaaagtccagcgtggagcctgagtaacgagatcgacaacaagtcagcgggactgcacgcgcgaagaagatgcacaaaggcgacttgcccttgagaaggtccagagagatgatgtctacaacgatcggtacgcatggatgtacatccggtttgaaaacgctatattgatgtggggtgaatgagtctcgatctcgaaacctgggtttctagacgaggctgttgtccagacgaaacttactagtcacccacgaccgctccatcatcatccaggtccatcttgtactgatatccgtgacacccgccgctctccactactagccgaagagccaacttggtgttgtcaggttctcgtgatgcaattttggcgagttgctgcggtaccaatgcaagcgatgagttaaacgtcaatagtatggagtgggtcacggaggccagctcaccttgaccgcatcgtccgtcaccgtgatattggcctgctcctccggtatgaattcggcgtcctcaaactcctcactcgtcttcaatgaatctggtgtaggtggtatcaccttgatcgaagtggatgatccggtacctttcgaagcggtcgcataggtcctgccgagatgactgaggatcggtcggtatgccctgtgcgtcaggttcagggttgcgaccgatgaagggcgatgttcaagagctgatgctgtcctatgattcgtactggtcgagtatcggagtgctgatgtcgtcctgcttgatgcaattgacctccgaacagaatatcgacatgtggggcatgtcgaggcgaatagtcgcgagatgataggtcgagcgttcattgcaaagggggaggcggttcgaccaagaatgcgatgtctatcttgcaaagacgcgatttgaagagagactttgatggtgatagagtgtgacaatatccgttgcagtattcttcagatagctttctcaatcatgtcttgacatcgaagcgatcgatgatgatatccatcggtcttgtacaaacgggtcactcccgggattaaccgcgagagagatgaccgatccaaacgagaagctcgtcgtcgaaaagtagtttcacgtgatcgaaagagcaggagacgacctcgaccgatcgacatctactgctcgtatacatgtcaagttgaatcgacttggaacacacttgtatatgggacctgcaatgagtaccgcacgaccgtagatcatcgacgaagcaatcatgtttggagctttcagatcatcacaagtcaatttcggtggactcctctggcaagtatcccctcgtcgtcaaagtcggctcggtaacgaacctgctaactttacaaccttacaacctcacaatattgacgacccttctcacattcaatgtatacaggaaatcgccatggaggctctcgccaacgaggaaggccaatcaacgaaagcgtatgaaggcggtggatagcgtcatcgaggctgttagggcgagtggtgtggagtttaaagctttggtgagtttggactctcttctttcatccctccaacatatacgctcgggcttcctagcctttgaggctgggcgctccatttgtcttccttgctaaatctcttggccatcgaacgtgaataggaccgcaacctggccctgccgaaggaatccgagatgagtccgagggacaagtacaccactttcaaccggacaacagaaggttaccgaaagtccgttcacaaagtgcccaagtttaccagggtgagccatcgacggtagcttcttaatgtgtcagtcgtcttgaagctgactcgagtttcctcgtcttgtttgtcacagttgacgttcagggagaacccgagggggttctagagcgggtcttttgcattattcgcccggatgtatcatagtaatgtatcatcagacgcagacatcatttcttctccatacatcaaagctcagacgattaggaactacgtgaaccacggatgtgatagaatcccggaagaaggaatctgctggcagtcggattatggctcaatcgatgatctcaatgttcccgtcggtgaaccagtcgtcccagtcggtagcgtcgccgccggggagggaatcttcgatttggaatttggccggaaagaatcctccaacttcaacgataggtatggtaggctccggcttttctttggcgactttatgtttcatgggattcaaaggcgcgatgaacggggtgccggttggcgaaccggtgaccttgctgccccaccaatcgtcgacgaccgggtgcggggacgtcgattcgatcaacaggttggactgtttcgccggatcggatctcgaggacgtcgacagccactgctcagctggaacatcttgtccatcgtttgcgtcttcatgccaaccacggcccaatcgctcggtttcgctcgaatccggatcatcggcgatcatgtcttcaaggtccaagaggcaatcgtactgattggcatcgcacggttcaatagcggtctcctttgggatgacgggtggcctttccgtgtcgtcaaataccctaggggcagcggggccggtctccagcgggctcgagggtctggagaaaaaaagaggctcgcaggcgatcctgtcgatgaacggctcaacaaccatgacatccggactgcaggacagaggctgctgtgctttcttctcgacctccggatcatccttggtaggggaataaggagcgatctccacaccggaggaaacgtcggggctggtccatcctcgaatgcgttcagaaggaaggacgaactcggaaactagtaacgacatggcgtgaacaacgtcggaatcgattgtttgcgtgccaggtccacttacctgcatcatcccgtttctgccgcttggcatgatcttccgaacgatgctgctgcgatccgctagctggtcttttcgaagagtacttctccgcctggacttggtcttcagtctccagcagcgacctcatcacttcgtcaatgtctggaaaccaggggataacatgagctccaagtcacggctacgagcaattttctgcataccttcgtccgtgtactctgtcggcgcttccaggagtcgctcttgagcagaagccttgctcgaaaccacgtccaacgggaaagcatcaggtttggcagcgacaggagcggcgatctgttgcgacggcaggaatacatgattaatgctggcgcggcacctcgggctcgtacgacataccgcccgccgggccctagcgcgagacttgggcttgaccccctccttgcagcaagcatgctgacacacggttttacacttgtgtttgcacttaaaatttccgtttggtagcctttccgattctgtcgcttggtcttcaccagcagaatcttcataaaacgcattaaaaacttggtcctctgccatgcacgagcagatcaattgagcgcgatctgatgatggtaaataagatcgggataggcttgccgttcatgctctgtatcgttactggatcaatggaggccctcgcccgctgaaacgacggcatatccagggactcggggtacaggttgttggagtcctctggaagcgctttctgtagcactccttcggggagttcaggcaggaagtctaccgaatgttgttcatggttcagcctccggagctgcacgtgagtttcacatccctttaccttgaaacgtggagcatcccgctagttcgtccactaagtctcgacgatagaacatgtaagcgggcttcaaataccaaggcttcgcgaatctcactgcctcacctcccaccataacgatcagtctttggccctcgtcagtaaagttcgctgcgatcttaagaggctgactagcggactcgaagttcttcgcactgacgatgtagctggtccagtaccgtgccaggtccggactcgcagcgacttaccttgtatggaagtaagagacgtatgtaccatctgacaatacagctactactgagatgtttcgatggccgattttagagcccttctttgagcctttcctgatcagccggccctctaccgaaatgtggacgtcaaagacaaccgtaatcggggcagccacttctctggacgtatcagtgtcttgcctgagaacacaatgccatcagactacgacgaattgccaagtatggaaatggatgtctgaatctcacctaatctcgagatgaaacgaaggaaactcttcggctgcctctagaagctacaggcggagtatgatccctatgcgtaagcgtatacgatcccgtcctcactactagcataccttgtttccgaatcctgggttcctgttcagcagcatctccagacgagaggcgctctgtctacggagatccgcgaaacctgatcggaattgtttcgtgagaatgtacgtcagctgttgcaagaaacggggcaccgacctttgatattttgagaggccaacaccttgatggatttgggacctgcgagtttggcggtgagtcgcagcagccgcagaaacctgagtagctttacctatggtatcgatttgtctcaggacgacagcagcatcttcccaagctgcaagtcagatacgtctttcagcggtgcgattactcaaccagcgactggcgcttggtaacctttcccattcatcgttcgcatcaactccagagccgaaagcatggcgcgcccttgctctcgagtggcggccacaaatgcgatagctgaaagatctcggaaaatcagcggcaatagcgagctaatgtggcgattcccttgcctttgcatattctcggagcgcatctccagatttggtacaattctttggtcaaattgaattttgtgcctttgctttgatcggagtagtcttctaagcaaaccgccccaaggcatgtctgtatgagcacggagatccagttactggattggagaccgtttcaacaggccgaagtccgctcgtcaatgaggccgtgtatacttactgatgttctggcttcttttctgttgatgtcggaaatcgtagctccgcgcctttgttgatctttcgaagtaactgtgagccggactatatgagcgtagcttctattagtctgaatcgctaccgccactgacagtcttttccccttgacgtatcgcaatacccgaaaattccgtagcttgcgccaacaactcaagcaaattctcgagtgttgagtctccagacatagcaaggattctctgcatctacaaatccgtgcattgagctttcagtgttgaatcggtttatctattttcacacaccgtctccagtcctgcatgtagatgctggctcagagttttgacatggacaatacattctgtcaagcctactcacgtagaacgcaagcactcatcacgtctccgaatctgtaaaactaatcggtcagacaatcctatttgacagattcgtaatcactcacggggtcgatgcgacaaccttagtttccgattcagtagccgaatcggtgggatcgagagcgtcgaccgtaaccagcccatccttggacagctgttcgatcgcacgctacattcggcgtcattagctccgcccttgccatcgattcgagcctgtcattcagctcgcacattgacaaagtcatctaaagactgttgccagtcaaaggaatcgttggtcccaagcttggctgcgtagtgttttggattttgctgtatgcggacatatagaaaggagctactccggaaatcaaccactaaagtatatgcaagtaggtgtcttggtgaaccttacctccgaatccactcatgaccatcggaggtgcttcggatggttttaagactgatttcggaattgatatctacaagtgatgcaattcggcttgcctgctggatttcctcgctttgtcgtgatactgacgctcggtaagagtttcgtgcagtctcgactccagaatcgttttcgactcaacgcagcctttccactaagaatcaaatcagttgagcattgaaagtaggtagaacggctaaaccaaccttttgttcaagctgcttttcgcacatgatctgcttacgaacatcagtgagttcctgttatcgcatccgccttccatcgcactactcgccacgacttttccgtgcgtatcatattgaggtctaccagctctccctatcatctgctgcatatctagatctgaatattcttccatggctgcccaacatgaaaagtctcactcggtaaggcgcgatagactagctcgtcagcataaaggaaggacactcaccgccattgatccaggctttcgaaccaactactaccacggtatgagcaggaagattgactccgactgccagagtagaagttgacacgacaaccttgtatgttcctgacctaaaaccgtcctctatccgttttcgaacatgctgttcgatgccaccgtgatgaaatgcgatcccacaagccgcaagggcagactcccttgagtttcccccttgcgcaggactgttgttgtattgatcagggagtttcaatgaaagacttgctcatcagacccactagcttccgattttccaaggcagctgtcgaccattgttcttgtccgcttgataacgctgtagcaatgtgtctgcgatcgcttcgcaaccttatgtcccaagaaaacgattcaaactctgatcaacctgtcgtcgcccaggacttacctttcctcgtggaggcgaagacaagaacaggtttgttcttggcatgttgtaacaagacgccataaacctcatcacgaagcttgttgacaaaagcaaagtcattgccagaggaattgtacccaataacgaaacgatcaagtcgggtgggtctgaacgcctcgccgaacttgtatcaagtgcaaacataaatcagcagctagtatggtaacaggggttttgcgcttaccttgaacaccttggccatcggcaattcgaggaaagatttgcagtggacgtcggcggcgctacagtctcctccagcctcgtagaaggcggcacctgatgggctgagaggacgaagccatcgggcaacatcttcaacattgggcacctgtttgagtatgatactatgtaagtgccgtggtctcaatttttgctcgctttttttcggcttacggtagcacttaaggctacaactcgaacgggagaagccctcgcggtggtacgcatccgggaaacgacgacttccaaaacagcaccgcgactttcgtgcagcaagtgaacctaagattacagccaggtaaacccgcgttgtaccttgacgaccataagccactgacctcgtcgatcatgagcagtccaagcttttgcataatctggtcgctttgccttgcaacgcgagtgacagcatcccatttttccggctgtgtgaatcatttgacatcagtagcgcacggaatgtcctgatcggacaactcaaaccgactgtggtaatgatgacatcaatgtttctagacgctgcagcaaaacctttcgtcccatcggtgtcgcccgtgtactctaggcattttagccctacaggagcaaatttcgcattccaatcgctgtaccgctcggtacacagcgcctaaagtccgggttcgtcagacaatgatcagtccgcatcgggaagacgtgcaggatttgaacgtacctttgtaggggcgagatacacggcaactctccgttctcccgagatccctacatcgcgataatttgaggccgatttgagcatgcgtagcagagccagctcgaatattgccgtctttccagatccggtaggtgctttagaggaccagcgtttctgacaagtcagcccaaaccaggtctaatctcctgctgaaacagacacgtacacgagacgaccaggttttcgtcggtgccatatgcctggccgacttcagttcaggcgagcgaatcgtcagagacctgattatatgcttacactgggatatactttgctttgaacagcattgaattcgcgaaaactgaaaacacgcctgaaggcatcggctgcgcgggagaaagatcgttccattcagtctgcagctggattgaacggcaactcgatgatctttcatttacgaagtttggttgtaggtatcaggttgataccgtgagatgtcatctgagacattccattgcgattgactggtagggtgtaagactcagcagcatccacgccgtcttccctctccacctgagcacgagggaccgctggcgtgaagtcttggtatccttcgcatgtcaatatgagaaggtagggatggatcaacaaaccttaataattgtgcacgaagaggcacattaccagataaatcttccttgaaagccatcccgtcggcgtaatcttgaccgtaaccatcgaaatactcgtcaatttgctcagatgcgaccgcatcttcttgagtggctgaataatcaggagctggaggagtagtgagagctgtgccataaagatcgagcgacttgagcgtggatgggactgacgagcgttgtgatactgcagcgtttcctcataccacgcttgctctgcacgtatcggctggtcggggtgtcgttgttgctgatactggctacgatatttcaagtggcggagtataggtgaatcatctgcttgtcaaaacatcaacaaagtttgaaagaatggtatcgtctgcggtcgtgtgacgtaccagccatggcagaactgtcgctgtgaggcactgtcctttgattgtgaggttttggttgctctgtatctgcatcggtgtgggatcgtccttgatcatatgggtaataccggtctccgaaacggtgttcgtaagtcttcggaacatagcgatcttctgagacgacgtaggagtcatccaaaaggccgtttatggcagcgtagtttaaggatggcatcgttacacccgcaggactcgtgtgtgttccggccctggagtgaaaggtgaagatcgatggccaatgtcgacggtcaaataaaaatctggctagattggtcgatgaaagagaatctgggcgtggatgagcggcgagacctttcgacaggttgatcgtgatggctatgggccgaggttgatcagccagacgcgatttgatcggatgcagatttcaaggggaaatctgaaacgcgcctcgagattgtcgtctactccgttctacgagcagtagtatcataactccgcgtattagcggtacaactaggatacaagatctttatgtttttgatatcacaggctccttgttcgtcttttgagctcgcttctcagcctttacgtcggccttcttctgcaagccttcagcccgctcccgcctccactgcggaccacggctgacgactagccataccaaggggcagaatgccaccacgattccggacgatatcacgtacgtccatccggctccgacctttcgtacaagagcatcactgaagggtccggcagaatgaagcagccatagctcagcagctgaattatagaaggaggactcaaagcagaactcacacagcggaaacgagagctgcagcggaaaggcagcggcacaagttgaactgaagtaattgcggatggttgagtttgcgtttcaagactagattgatgcgaaacttacgctagctgtaatcgcccctccgttgcctggaaacaggtccaccagaagcacgctggtgattcccatcgtagcctgcaggccactgccgactgaaaaaatggccccgagagcctgagttggggctaaaacattggccatgaccaaaatctcttactgaagaagttcatgacgagcgagactgcgacgttcgctctggcctccatcgcccatccaaatcctacacaggcagccagaaagatcctgtctcgtcgagtggtcagttggctatcggccgaaagcctccagcccctttctgacttacaagacgatccagggaaatatcctgagcctaaccttttcgatgggaaagccgtccaacgaaattttgtctttcggatcgaatcccgcttttgcctttgctcggccataatcccagttcaagaactttcctagagcgaacgatgtagccatggctccgattccgttcggactgttatcgaacaagtcggtcatcttggagaatcgagccagataggtggttatcattcaatggacttacagatagcagagaccgatttggatatcgttgtacccgtagttcctcttcagcagggtcgaataggtcgtcaagacccaatagtactcgatgtagagcaaactcgagaaggtcaacatggctgcgatgtccgggtatagcagcattcgaaaactgccgaacgggtcgaactgcaatatgatgaggccatgtcagccagattgatagacgcaggcaagaaatccactcgggtgacctttttcggctccggcttgggctgatagtcgagcggcattcgggaagccttttcgagaggctttttctccaggcgtctctgtttgataaaggcgaccggacgggcgttcaaagcaggtggagagatcgacccatccccgacgattgatcgcagcgtttcgggcaggacactgtggattagagaatgagctgtcagcgcgttaggaacaagcttgtggatgactgaacctcacatacaagatcatgacgaccaaattgataccgcacgcgatagccaagagccagaagatccatctccaactcagggagtacgccatgatcccgcccaagactggcccaatcgcaggtccacccatactgaccgcactaaagagcccgatatacccgcctctctcttccggagtcgcgatgtcgcctatgcagccactaccgatagcgatgaccgccgaaccacccgtggcttgcacgcatcggagtagcatgagtagccagtaagccgatgtgggagtgagggcgagaccgatgcaggcgagcacgtagatcgtgagggtgaggatgtagacgggtctacgaccgacactatccgccagagaaccgaaaaaggacggtgtcaagccctctgtcgggatcgtgtgtgagggacgtgtcagcgggatcgacagtttccatactataagaccttcgtgatctcacgaaatattctgagacagacgcgtcccacgcgctcatatcagtcatgttatagattgcccagattaaaaacgctccaatgactcacaaatacatggttaatgtcaagttgatcgcctcgatgctctttccaaactcgtccgctattgtcggaatggctggagcatagatcgtcgagctgatcggactgtcatggtgagagcaccattccgaaccacaggcaatagagtccttctcaataatcattttggcttttgtttcacagggcgcctgggcctacctgaatatccctgctatgctggagatgatgacaatcatccaccgttggttcttggtgaatgccgaatacggtcgcttcggcgcttcctcggccttggtctcttctgatggtgatgcgatctcgctcgtttccacagcgagtacgtccacagggtttgaaccttccacctcgatgtccgtatcgacgggttcgggggtaggcgtatcgcgcacgagcgtgctccccgtagatcccgtctcccattcatttccaggcgcatctcggacagtctgattctcgctttctggtttcttgtcttggttcccgtccggattgtttgccatctcgtgttgaggctcggtgtcggacggcaaggcagagcatcgtttcctgcacgaacgaggcgtccggattttggtcacggccgagaaagtactcgttccacccaggtctgtccggtcttgctccattcctctcgactggacaggttatcgctgacactgagtattcagtgaggtatacaggcaagttcttgtcagatcgtcccttatcgaagttgaaatgcagatgtcaccggggaactgatatacgaaagggcaagaggtcgaagctcgaggagaatttctatttcggatcaacgtcatcttcccggctcaaggaacgaaagttggatcgggtcggctttgaccgatgacgcgggatctccgtgacaactccggttgcgagtcgggcgctgctgcgtctcgacgatcctaaccccgtgttctattgatctggagctgagctcgaacgtattttgctacagaaagtggattcgcctacggtgagtcgcagtgccagaaggtgcagatagatcttgggtatatttccggacttgctggttgctttcggtaaggcgcgcggggagaagcgatcgagatccaggtccattttcaatttacgatcaccgaacggtgcgggcacacaaagcccagcgttcgttgtgagatttatctagggtgcttgaaactcatgtcagattcgcgtttagctttcacgaagtcgtcgacccgcagctcgtagcacgtataccgatcctcatcacgatcgttcgtgaggttgaagacgttgtgtgaccgaaaacgagagtatgatcatatgatgggaagccgccgagagtgtggtgatatcatcgatccaaccgagaatgatcgtcctcacgtgatcacgtaatatggccgttacctctcctgcgtctcccgcctttccccttgtgcaatttgcttccgcacctcccttggcccagagaggacaggttccgagtcgagcgaaacgaggttgagagcgagcgagcagcgaggggagatgctgcgaccatgttagcattcgagtattaatctccaccctcacaactctaatttcaacatctagtctcttaatcctgcctcatctcgtcactaccgtttcacccgctctcttctggtcgacatcccgtccaccgccgtttgctcgcacatggcacctactgctcgtcccgtcttgccaaagatacatatccccagcacttcgtcctcgtcttcgaccaccaaattagcagctcgatcgacaggacagacaaaggtaggacagaaaaatggctcaacggattgtcaccaggatgaggaatcagacgaggacgggctattaagggcccctggccagtccgggaaatcgaataccaagcaagaggccgtaaggacccgacctgacttgcccatccctccgacccctatcgtcgtcccgcctacccccgccagtgcgagtacagaccacaaggacgaacggtatagatcgcgctcgcccgctcaggagtctgtcagcgaggaggaggaagacgaagagggcgaacaggagcgatcggagagatccggctcgcctgaatacgtcgaggcagaatctccttcagagtatcgcgaaaaccaggatgagcacgccacaaaggagagcgctgccacagatggccagggagacgaggacgtacaactcgtctctacccctgaggaggaggattatccacctgtccagatcaccgagtcacctacgacggaggaacccgaaactcaggactatgtcgaattcgagtcccccgtctcagagcatgattaccacgagatgggatcggttgcaggtgatcgcaatggcgagagaaatagttcgtccagagctggagtcaatggacatcgcgggtcgagtgaggaacggcggggggacaagggagacgacgacgatgatgccgacaaggatatcgccgatctcgctcgtcgaaagctggagatcgacccaaacggcgcttcctccaagaagcaagaagaggattcgcagccgggccggtccgcagatccgcgtagcagatgggcgatgctcaggcagcgagcgcggccaaggatggactcggaggaaagcaacacgacgatgacgcttggcacagacaaaccgagcaggagcaatacattgttgctatccacgatggaacgggacgagcaagacagtctagtcgaggatcaagtcaagaaggaggaagtgagctctcctgttgagatcatggaatcacctaggagcgggtcttcctccccggaacgtggggtccagggggctaggcatggaaccgggggacgcagcaaggccagagacgcttcttcgtcacggtcgagatccaggtcgagttcacgaccgcctcagcctatcgcgggaacctttttggcgagatccccaggagcgattcacgagaccgcttcactccccgtgccattgacaggcagcgacgagagcgctggactagggcccgcatcagcctcttctgcagaagggagcagaactccgttctggaatcaactcgccaccagtcccaaggccggtgtattgtctggtgaaagcgaggacgagtcgatcacccgcgcggccgaactgaatcgagacaagccggccaagaagggtccatggccgtctcgacatcgatctagcaattcgccatcaccccggcccgatcttctcaaagtatctggttcgcaatcgagcgtctcgtccgccgcacgatcggcgccgaattcccctcggatgaaagcgagcaagggtcagcgacagcccgtggcgtcgcccgtttcgaaagccaaatcgacaaatcgagcgaattcaaacccgccggagttagatttgaacgatcgtgagctcggctcagaattgaggagtcgactcagcgggcatccaggacacgcacggcgcaatagcagtacacatagagtgctggaaacattggatgcaaagcatcatgccaatgaaaaaggacagaggatggtcaaccagtacgctctgggtccattgattggatggggagcgtatgggaacgtcgaaaaggggatagatgtcgggaccgggcaggaatatgtgagggactcgaccatgtcctggcgagtatcgctagcaacgactgatagtcgactcacataacaggctatcaaggaattttccaaatcgagactgaagcgacaacaacagttatcctctgccagtcggatacgcaagcccaaatttgaagaggatccggccaatcgtgggaacgacaaggttgcgagcaaggtcaaagggaagggcaaaagcaagggcgcggacgacgaggaagatccgctaggtttgatccgaagggagatcgccgtaatgaagaagctagagtgcgtagagaaggttgtcccaggatgtgcgatggtcttttgtaggctgacttttgacgcatctgcacccttcgctgtcgtttcagtcatccaaatgtaagtcatccgctcggcgcgagctctcttcatattacaagctcacttatgacgatccacctagctcgttttgctttatgaagcgatcaacgtcaacacgtcagattcgctatacctcgtcctagaatacgttcctggaggcacgcttatggacatcaaggtcggaggcgaaccatcgaaatcgctcaaggtcgaaaaggcccgatcatactttcgccagttgactcttggcctcgagtacttgcattcggccggcgtgacacatcgagatatcaaggttggtggatcgtctcgcatcgtccgggccaaatttgcgcgatcggctgatggggtcgacctcctgcgcaaacagcctgataacgtcctactcagcgcagatcgaacgcaggtcaaactctgcgactttggcgtatcggaaatgttcacggccggagacgatcggatgaaaaagagcggggggagtcctgcgttcatgagtcccgaagcggcgattcgtaggtaccgcgagccgatcacgccttgacaatccgagctcacacgatcgtcatactttaactgtctgaagtgactcaaggtgacgtccacgccaaaccggttgatatctgggccatgggtgagttgcatgtgacaagatgtcgtgcgatacgttgccgatgaacttcctgtctctatcatccaggggtgacgctgtactgtatgctccgtggtagcctgccattcgaggcggacaacccgttggagctctttgaggcaatcaaggaacaagagtgagctctgatgaggccgcatcgcgacgagtgggagattaggcactgataggggcggatctcttgacgactttactcagaccttacatccctcccaagtgggacgacgacgtcaaggacctcgttggccggatgctcaagaaggatccggatcaacggatgatcatggccgaactgagggtatgcggcaggcgttctctgggtcttggatagtctgggcgtccgtattaacggtgtgccctatcttgcgcaggaacatccttgggtgaccaagaatggcgaagaaccgatgcctacaacggatcaggttcgtccacctcgcatctgccggataactgctgacgtttgtgtcgctgacgataaattcactctgctttgacttgtacagaacctcaacgagattggtaaacaagtggaagagccgagtgaagaggaattgggcaatgctatttccacattcagagcttccttgtgagtgtttctatatatgctcgtcccggacgaggtggaccgacagatgctaactcgaggcccgctggatcgatagtactgtcatcttggcgatccaaaagtgagcatgtagagattatcaatcgaggctatagctgaccatgacctaccctgtacaggatgcgccgaatgtaccggcggcgccgcgggttgtcctcgtcgggctcttccaactcggcctggtccactccgacgaccatgttatcaccggcgacggaaaaacctcccggcggctccaacaccgcgccgagagagagtgctggggggtccaataagcctgggctgggtctattgggtgctagcggattgtcaagcatctctccgaacggggtgacggacgggcatgtcacaagtccagaggagattgaagcagacggtagagacgatcaaggaccgatggattactttgggagtagagggagtagcgggaagagtggtaacaagagttgattgtggaacggggttggtctcgagtttgacgagaggtcgagagagacgaggatcgccgggcggttcgagacgtaggctggggggatgctttcgacttggatctaactgtagtgtaattgtcatatttacctccgaagcgaacgaaagtcacatgggcgggggtcggggcaatgtgcggggtaattacggaaagaaaactgagtgagcacagccatttcggaagcaaaatgacgatgatgagtgggatgattccggggttcaggtcactcgagctcgaggttcaaaactagtttgcaccgccatatcgccacatgtgcaccctggttagctctagtaattctagtaatggttcgtcagtacatcatcttgtggtactgtcagatcgaagaggcaggtactctcgactctcgcgactctgttcttatatcatacggatcgaccgacaacctacctcgagactctgttgtaaccgttccggacgactctgagcctgtttcgcgcagtttccacttcaacaacaaaaactgaacgacgcaaccacaacaagaaaagaaccagcaaaagcggatattgacaaaacctacgtctctacttgcctgcttggccacctaatctctggcccgttatagtattcggtaacacccacaagcttggaacaggaaaaatcgtgatcggacgagcgcttctggaaatataatactttatcatggctggtgagttcaccattcaagcacatgatgccgccgaacaagtctcatatcgttcaccgctttcgaccgtcatggtgcagcatccaatccttccaccccggcaacgtccgcgcccgtgtcgatacctgcatcgcagacgagtcctacaacgccggctgcatcgagcgctgtggaaacgacccaacaggcacctgtaacgacacctacgacctcgtccggaaggtcgacctcggtcccacctactacgtcccgagctgcgggcacgacctcggtgcctggatcaacgaccaacacggcgacgccttcccccccaatcatcacggacccttcgtccaccctccctgtgaccacacctggcgcaacgacggaccccgcttcatcgtccgccccagtatctaccatcccctcgtctacctctgcaccgatcactaccgacccgacgactagcacgagtcctacgacatcgtccgctccgacttcggcaccggtgacgacacccacagggccggcttccacgtcgatcgtcgtctcgtcggattccagtcggggcacgatctacagtacgacggttgtttatgtcagcatgacggattcgaggggtagttcgtacctgtcgagtacggccttgaccggggggtcgggtcagctcaattcgaacaacaagggtgggaatgatcctagtaagtacgggcccagggagggggctggggatgaagtgatgacgtcgagctgacatgttgtctgcagatatcggggcgatcgttggaggtgttgtcggaggagtcgtcggagcggccgtcttgggcgctttggcattcttctattggaggaaaaagcgacagcccaaggcgagcgcattggacgaaaagatggtgagtctgcccgtccctgccttgatcacgatcctatcaactggaacgctgatggtccgactttattcatcccagttcgacccttcgcgcacggcacgtcattcgggaggccccaacatgcctgtcgacttgatcggggacggtccgacaggtgggaacgatatttcgccctatacggcgggtacggggtccaaggcggcatcagctgctgcatggggcggcgtcggcggaacggcggggatggccggggcgtatcaccattctcgtgaaccgtcggatcctcggtacgcttacccttcgagggcgagtttcgactcgaccgtctacagcggtacgaccgatccttacctgaacaacatggccgggttcgggacgggcatggctgctgcggcgggaccgaacggcaggtccaggggaggcccacccgctgctggagggttctctgacggatacggagggtcgagttcggggcacgatcatgggcactatgcgtccacaccgcagtcccccgggaataacaatcggaggtcgggaggatggggcgtcgctgcagccatgagcaatgacatgcctggcgatcatggaggttaccattcgagggattacgccatcgcggggtaccctcgtggtgaggaagactcgccgttccatgaacctcccatgcccgtcgccgggagtgcaggcaatagtaacaataggatgagcgcatccgccatggccaaactgagggaagctcgaggtcaagctccttaccccgatggcgatgctgcgggtccagtcggttcgcacggacgacgcccgagttcccaaggtccgatttcttaccgaggcgccgagaacgaggtggatgattactatgggaaccatcagaggaggagcagtaatgggttgagcaggacgagcgagggggatcatggagcgcaaggtgggaacggggcgagtctggtcgtgcatgacgatgggggcccgatccacgaggacgaggaggatcgagcggccctgcccgccgagttgccgccgacgtgagtggatctggtttacatagggagtcttgtttgaaaagggtatgaactgacaggtgtgacttgtgatgctttgtgaatgcagttacgactcggtgcctcggggtgcaagatagtcggaacgatccggttaggaaaaagggatcgcgcgatttgacattcacgacatcgaggccaagcaattggatagaaacgtatcaaggtctcgatgaccagaccttggactagaaacctgtagcatagatattggcgacatgataacatgatctgattgtagcatctccatcttgcatttccgtgttcgagtttcatccgcggtggtggctcgctggctcgatctagtgatctgatctagtagtgagttgagttgactgtgatgatgacgcgttcaaacgatcgtttcaaacagcaaccaacctctagctctagctagctagatcgatcaccaatcattatcgatcacgagtctcgtctcgtcacatcctcctctactcgagattgatactactcaaacaaccgagagaccgtcaacaatgtcagccccaaccgtactcctcagcatcccatccgtaaaactcctgcacattcccgctccgggacaggaacctatcacgctcgcctcgggagagctcagtctcactgaactgccctctgaatcgggacaaaccggtggactcaaagctttggcattgtccggtaggtaacaccatcgtcgtagctagaaaccgaagaaccgctgacgatactgttcatggactttcagtcgaccatgccacctttcccatcaccgtcaaggcgcccatcagccctgtcgagaccaaccaggctcaccctagctacgtcttccgccctgccggactcgacgcggcgacgagccccaaccaggccgtcggaggtctaggcaaggtcaagatcgtctttgccgagagcaagaaccctagcgattacgaggccgtcgaagctctcgcccgtgcgttcgaatcgactttgagggaacacaaggtctggaaggaccatgggtactatgacgacgaagacgagatcgacagggaacacccggaagccgccggatacgggaccacggtcgccgatacgctcacctcgtatgccaggatgttcagcaacaagctcgcccaactcaccgactcgcacgtggacaactcggcccccctgcgtcctacccagccgggcgatgggatcaagtcgctcgcccactcctccgaggggttgacgagccgtatagccggagtcacgggagtcatggccacgacgatcgggaacgtcgttcacgacacggccaagtacgtaggtgacatggcacaccagaccgctcaggatctcgatcagaagtacgggagcggcggacatccgggtccggtcaggcagcaggtcaacgagaccgcccagggggtcaaggaaatgggtcaagcggcgtacaacgaggttgccattgcaggcaaaggcgcgttggatgcgtgagtaaagacagaaaggtgacacatccatcaaaggctgatgggttcgctcatcccgtcgtgatctcgatatagggccgagacgacgggatctgcaatctcgaacaacatgcacaaggagatcgcacacgatctcggaccagaaagcgacaaggttgcacaaggtacgcgagtcgctggtaccgcacccgacatcgacgtcctcgctgacttttttcactcccatcaccttgcgtctcctgatcatgcagatatcggccagagcggtgccaacctggccgctgctggtggtgacgtagcgttgagcacgacgagctatgtgcacggattcaacgccgctaccggtgccggacaaggtctcgctggacagaagtagaaagaggtaccaccaaactatccatcgaatgcaggcagaagggcgattgttgtacgtagaatcgggtgattggatgttatccaaatgtcgcaacgtcagtcatcacggtcagaaactctcgatctttccggtgcatcttttctcggaaggaatcgctgtgacagccaagactgcttgaaatcgagcccgtcgcccggttgaataggacgaagcgagaatttatctagaatgcggtcaaaggtatcgcttggcgggtgatgattggatttgctggctgcaagtactgaaacggcgtgataaacaaggattgacgccgaagtttccgcaaccttcactgagcaacgccagaggagctcagaatggatatcaagaggttacaatttcgggatattccaaagaagccttcaagtgcagccagcgcgtgttgatctcatctcgatgctgacgtcaagcgcgctacgtgcttaccagatacccctccttctaaggctgaggggttggctgcagctgttttactctcgtctgcctttgtcgctggagattatcaataactcctccaattgcttcttcgcggggatcctgcgtgagttcaaccagctcgaaatgttcgtgtgatcgctcacaggctgtgcaaatgatcctggggtccgctaacacgcgagacccaatcgggtggatcgcgctatacgtttcataaaagcacatggccagcgtatagtggtcgataccttgttgctcagaagatatcaggtttcaagtgtatactatgtccggcgccaaacgggaaatcgcccacagcccggctgtaaaaaggccgctagggattccgaatcggttcgtcagtggcgcaagggagcctttcacacatgtctcctgtgtctcacggaagccgtcctttccccttgttccagcgctactgatcaaaggaatcgttcactctagatttccctccctggccggccggtggtggagtcggaaacgcccacataatctaaatactgcgctcgaggccggtgcattgaatcgagtccaacgcctacacgccatatcaccacttcattcgctctcaaaagaatacgcaggcgtgttctgtcaactcctccaacgaaatatcttggcaacaccgggcgtgttctatccgttctttctaaccagcaaatcatgcgagcctctacaatgatcacgattctgacagccgcgacctccctcacctcgggggtagcgggtgtacccgtcgagcacgaaatcgtcgagaaagatgtcgttgtcgtggtcgaaaccgtgaccgttgccgttaccaagctcgcaggcgggcctcagtatacagctcagccggcacccgttgctggtatggcagtagattggtctgaaaaatggggcggcagaggccatggcgatggttggggaaggggtaaaggtgctcagcccgataatgatcagcaaggaggatcgcctccggcttctgtccctgctgaaccggtggagccagcaccttttcagtcgatcgcgccgccacccgacaccttgcccgagccggatgtgactcaagctcaatccgacccagagcctaccactgcggccgctcagccggagccttcacccgatcccccgccagccgagacgcaacagcaggcgactcctccaagtggggacgatcaagcgaagattcttgccgcacacaacgagtatcgcgccgcttgtcctggggccaagcagatgcactgggacaacgatcttgcggctgttgcagatgagtgggccaagacgtgtaccttgggacacccttcaaatcgagagatcaatggtaaagggtatgtggcttgtgtctcgtgataactacttctgttgagctgatattctcctctggctatttggatcagctatggtaaagcaagcgcgatgtttgagctcacataatcgtgcgggtctcactgacggcccccttgtacaggccagaacgtggctcaggttgggagtacctccgccgattttacttatgatatagattccatattcaaacaatggacgaacgaattcggtgcgtattcctcaaacgaatcacgcatagacacgatctgaccgcattgtcatgtactcaggggattacgctgggaaaggagctgccaaacctgcgggaccggatggcaaggaaagaatgataggacattatacgcaggtgagcaaggacccacatcattcaacgagccagcgccagatcggtacgagctgacgacaatcttttccctgctacaggttgtctggagggattcagatgcgctcgggtgcagcatcgtgaaatgtgatggcgcaggggtcaatgtatgtatgtttcattcctcgagcaaagagaatagcactaaaacggacactacagtacaatctggtttgcaactatggcccccctggcaattatggaggtcgtaggtcatcggtcggaccgcatagtttcagaagccgagagctgaacctaatatgtgtgcaacagagtatgcggaccaagtggacaaatgttggagggcacagggaggggcgtagtgtgccttctctcaagtagctactacgaaggtattttgctgcctgcgatcacggcatacggtttcgttcgaaatgcacttgtgtatctatcattttacaacgtgacgactagatgtcgcattgatacaaatagcgcgagacgttcagggctcatacttcggcaagaatcgggtcgtcggaactgtctgaatgctttcgtctgtcggcgcagtggccgtagcatggtcttccgtaggcaaatccaacccaaggctccgccgcgcgtgactagctctggcagctggcgtaggctgagcgaccacgccaggtatcggcgctgatgattcgacatatccctcgatgtcatccgccgtaggggccgaggggatcgagctgtctggattgtcctgccgctcgaccggagtttcgtcttcggcagagggcgccgagggacctatttcgggaaggtcgtcctcggcaagtggtgcgctcgctagatcgagtgcaggggcttccgaaataactcctctgaaagacggagccgaaggtgccgatggagcagccacgtacgaggcttgcaagacaggtcgaggaggagttggaaggctcgaagtaatcgtgtagtcattcgactggatgaccgggtcgatcgcgctgtgctcagcgtctagcctttcgaacccttcttcgtctacgtcgagggcaggcgcagtagcgtctcggccaatgtggttcgacatcgaaagtggctcttccattggtggctcgtcgcttggcacgggcatcgacgctgcgtttcggagctgttccaacactcccttgtcgtctgtagccaagtgacctgtgaccgcggtatcgcctacagtctggtgacgtgccccaatgtcgggaggatgagagctgggtccgtcctctacgccagaagatctgccgacaccggtgtggccgaaagcgacagcgacggcgtcttcctgatctgcggtcgttggagctgggtaataattggcaggtcgtttctccaacgctcgcgccgatgcggcagcgggccctccttgcaccgaagtagaaccgtccatctctccgtgtcgaggaagagcgtcgagcagctcctgcgatccagtccttggtgaagatgatccgtgagccgaagcggttcgataataagctggagggaaatgaggtgctgcaaaggtgacagaagcctgggtggttggcgggccagcctcgccagacggcgctcctggcgatctcgaaggatcagcaatcggtgcgtccagaggcgcctgatcaccgctctctgtggtccgtgtcatggctctgctcatggttcgggtcaagggtaaatccgaaggcaacgtcgatgcaggtgattcggttccatcccgcccttccgaagtggtcccccggatcgaagcggattcgcctgccctgactcttgcttcagagtcgacggccgtcgtactgctaccctcgccgctcccttccaccaagctggtcgaggatcgttccctcaccccgggcctattcgagccttctcttcggtcgataagaatcggttgcacgggtgtctccacagcttgcgtgggagctgttgcattgctcatcgtcttgcgcttcctgagtcccttgcgccattccaacacccggccattccccaacctagtgactccgacgctgacgacccgcctgaccttggctcgatttccctgcccagccgccttgaatttctgctcgagcacgtcgtccctctcggcatcactatcagcggcactgtaacgaccttcgttcgatcgctgctgatccgcctgaccagcgacccgttcggatcggatgatgtcgccgatcccattctcttcatccccgagactgctctcttcatccctgaatctctctcccgtggtggcgccattcccagggtggtcagcatgatccccacgttccgctgtcgtctgcctggcccgctcgctcttcatctgctgtgcccttttccgctcacgtcgcgctcgtctccgtttcgcttttgctcgcgagaccacggttctacgagatgccaggaccgataaccaatcaatttcaatgcggattgtgccgatgtgtaaaggtcgaattggactcacatgacgatgaagcaaaagatgacggcggcgagacagacgcttgcgaccgtgatcaaaggcacggcgtaaagatccccacgatcgctctcgatcccccatcctcggggtagagcgtcggttatcagaaacgtcgtatccatcccgtcggcatctgccgcggcgacttgagtggccaccgagcccgccgtagaggagaacggagtgggctctggttcagtagggtccaaaagagacgtcgtgatggtcatcgtgctttcttcagcgcgaccgacgatcgaggggtcctgtgcgactcgcccgtagagttcccaattggccgtcccgatttgaccatccgagtcggtggtgaggaggtagggaaggacactgttgggaacggtgatacgatgaaaggtggattcggtcgtcggtgtaggtgtggacgtgggttcagcgggtgggatcccgtctctacgatattgcgtgaggagaggaggtgcatgagtcgatcgaggtttggacgagtgagagggaggagtaggagtcattgatgatagaggaggagacgtgcgggtgatccaacggggtgtcgcttcgatatcgatttgttttcctccaaagcggtcagtcgacctctcgtggcctggcacgacggccgagatcttttcatttgacgactcgtttcttgccagtcgctcggtagagcgtctcctatccctctttgctcgtacgagataaccatccggtgtccaccgtgctgttgatgatgatgatgggatcgatgacacggtcgattgggaggatgaagtggcaggagacgatgcacgatcccgacctgccggcctggctccagcttgtaccggcagtagcgagagcaggccgagactgaccagtgtcgatcgagcccgagatgtcgtcctggcaggcgatgccatgcgctcattcattgatgcatcgttccgtcccgaagtcgaggtcgatgtcgatgtcgatgttgtactggagggaagagcgtctctccacctttccatctcgtggcgatccgacgggctatgtctcgcccgaccgacgatcgatgtggacgatgtcccaatagagatgacctggccggcttccttgtatgccttgactaatgtatgataatgatgtctatcgtctccttgtggtcgtgacggtcttgttgacggtgtcgagctgttgtgcgtagacgacaccggcgacatggttggtctcgtcctcctcactgctacgacgaggagacgcgagagcgggagacgacggtgatcgagggtgagctcggtgtcagacggtgacgcccacggtggctaatggggacgacgtcgtagacgacgacatggcggtgatgaacaatatgatctgatgtagacaggaaggtaggtcgacagatgatgatatgattcgatagcaaagggaggttgccccagctatagtagctgttagctagtagtctacggggggaggcgatgaacggggccgggcgaggaagcagcgggattgttatttttggttcacaagtcgcacaagatcacacggtcaatcagattaaatagggaaaaccatccacgattagcatagagtggccactcggcggatgatgatgatgatgatgatgaccgagagcacttggacatcgtcgagtctgttcgaggaaccaattggtcgaggtcgcacaatagcaacatgacaagtcgagcaggtcttcgtacgatgcatctcggtcgtcgaccacaccatgttccatgcccgcactgacatggcgagttgcgagttgtggccgcgcgcgaactgccggacggcccccgcttttcttgacaaagggcccctgaaccccttgcctttgtggacctcttcaaagacaatcctcctactcaaccgacacgaaaggacagtaaagggacgcatctgatcctgtaaaggactctacaccgaaatccgaccggtccgtacgccctggagacccatcctcgtatgcctctcgtatagctcgatttcacgtccgtctcactcacgtctcacaccgctcaagaaacccaaaaaaagagaggcggacggcacggtcaggtcggcccctcccccgctccaagccgcggctcgtgcggcggaggatggcgcgcgaacgcaagtgaaaacgaaacggaagccgcccaaagaggcaagacatcatcgagtccttcctgtcacacgcagagatctcggactcgtcctggcctcgacttgcagaaacatccccggatcccggaaccgctcaatgataccgctctcgcatggggaaatgcgcaggtccccctttgccgcagtaatattccatgggcatggcctgaccccgtgactagccggtcgccctaggtcgggggtatcatgtctcgtatcactcatcgtcgtaaaatgtacaagctctcactaatctcgacgatcccatgtcgaagatatgtccagtgatcgtattatcgtcgtgttcgatttcctccccttcccttttctcacccgccgacgatccaggcggtatcgtccgatgtatttccacgaatttccccgaaacacttccccgcacaccgagacgggacggcggtaaatcgcgctaaaacgtctcaaccggcctaagcgaaacggacgaccggatcgcgtttcgggggttggtccatcatcatctcttcaggttcctcccaaggatccgccgtctcggcctcggccactgcgatagagtaaaaaaagttacacagcgttatcgtttcagcgacgcactgcctgcgcacatcaacatatcgaaagctcacacgcactgatgtccagcgttttccccgccgcctgatgctgcgacttcatctgacgcatccgatcccgaaggttctctcgcctctcccgcctcttgctctcggtcgagtattgcatactagatcccgccgtagaagatggcgtaccaaaggttcccatactcctcgcgtcgtcggccaaatcggacgtcacggttgacggtgaaggtgtaggcaacgtctgcgtgctcatcgaggtggttgacatcgtcagcgattcttgacgggcgtgatactgtgtggacgcgggtaagcgaccgtgcaactcggggacagtatcatcgaatctttggaccgccctcagcttggtcgaagacggcggagtcgggagcgtcgacgcatcataagccatctgcgccgctgaacgttgccttgtatccgatgggcggagctcggagtacgaggcgctcattgtcatatcctctccgctaccagaatgtaaagtcgaaccggcgctacctgccattttcgttccgatcaggaacgcttcgagcattccaggcggaatctcataagtccttccgttggcaggatcgatgtagtgcaaaacgccaggagagatggtgcccccagacggactgacgcctatcgatgaggcgaggtttgaatcgtctgaaagcctattggcaggcagttggcctcgttgattgttggcggacgagatgggcggcaggtccaaatgagacgccagaaccggccttgtggccggggcaaataggacctgggccggcggtccggattgcgagcccggaatgacgatagtaggccggagtttggtcatcgtcggtccgctcgtttccaaagtcggattagcaaatcgtgactgaatcggggtgacacttcttccggctcgcatgtccgctctcgcctgctgcaagatggacggttgacgacgtgccttatctatggatggcaacgtgggactttcgatcgaagaaatggagcgacgctgcgttcggtcgggatgttttggttgccacgacgatgagaccgcatctgaggccatggatttgccgcctgcctccgaaaaggtttccgatcgttgtttaggtcttgaaggcacagagttacgacgagataagctcgaagatgtgtcaggtcgtacggctaacgctcctgatgttcgtagcgagtcagtcctttctctcgtcttccgttcgctagcgcacctaccttgaagtgcaatcacaggtgttgcgtctgacccctgctcggaatgttggccgtcatgagaagcgctgaacgcggtaaacgttgtgagtctaggtagtccaggatcgcactgcattaccactgaccgcagtcccgcgatgatagttttgagttgaagaagccactcttggtttaaatgtcgaccagcgaagcggactgatagcaaaccgtcttccgcagaagccccctctgcgtaattgcttgtcaaggtgaatccatcatcctgcaaaggagacagtgttgtgccggaagtaatctgagcgcgtgccagctcagtccggcccctctccttgattttatgagatatcgaccgtttgccgttcaagcttccgggctcatctaggatatcgtcggtagtgctgtacgaaaataggtgcagagacacgatcgccagttgcgctttaacaggcgagactgtgaggtcgagggattccggccggtctttgcggaccgtcatgacaagcagagcccgattgcctttgtccatccccaaggtatcaggcgtctcgacgtccgtagggatccaacagactcctgcgtgtacaactagatctaacagagatctcaatccacaggggaatggggcaatgactggcgggtcgacagcagcttgggtttgaggttgtgacgcggtaggagtgatgtctgtagcgacaccccatatagtaacatcagcgtctatacgtgctctttcggccgggagcacacgtaccgtctttaaggcggtctggggtgggatcgtgtaagttcgtccctttggaaaggctcgagacatttgattcgactcgcttgtccaatgtcctggtatcgtcgcgtctcgaaccttctgtcggcccaggaggaagcagttgattctccgtttgtaacgtggcaggcaagtttccttcggagcgggatgcagcaagagctgtactcgtcttcaaaataggcgtaggacgaggaggagctgggtataccgtacgacctgaggatgaagtcttgtcctgtcgacgggctatgttctcaatccccttggagctcgggggattgctgcccgacacattcttgaggaatgccttgaaagctcctcgccttcctgacgtcttgtcgctgcctgacacgctaccctgagcaacgaaagatgattccgattgtttggtatggtacgtcttggtcgacggcgcgaccgacacttgaggagaggcggcccagggctcgggcgtcgggccgatcgcggtaaatgaggaagcgcttgtagttgatccgcttgcctgactcgtggccgaatcgcgccttctcctgatcaggcgggtcaaagcagccgtcgactttgtcttgaggggcaccggggtcgtaccgaacggctggacaaacatatctggcccaaggacgcctagaccggtcagacctgcttgatcttgcattcctgggggaataggaaagtcggatccgaattccccttccaactcttcggcctcgagctcgtctgcgatctcgtcgccaacgcagagaccggcgattcgatctcccttctgggatatgtttccatggatgtggtagtgagattcgacgccttcctgtatgtgctccatttcctcgacgtctgaaaccggagtgatgcctacgcctctttcggccgctagtcggaggagacgttccttcctggcagagatggtcgatcgacccgaggtcgcgctctcgaggtctgtgtaagtcgtgtcagaggtcacgcggaatagcccgctgcctcgttgagaagtttgacttgtcgctgatggggtacgaagccgtgttttgtccaaatctagttctagtcttgggaatcctcggggacaggcgtcaagaccctgagtccgatcctgataatgatgtatggcgaggtcgcttccacgcgaggacgccggtgatctgtttgattcgtttagcgttcccgaatccatggacgtgtcatccggcttgagacgtcttcgcctggaatgcgaggtcttggacctagttcgagccgagggctagtcgaagtcaccaagcgactgtcagtcccggttcgatttcacactctattcaggtcgattcgtcgtacctcaacttcgacttcccatcgctctgcaatctgatctttctggcgctccatctctatccgtaactgacgttgttcttcgtcggagagctcctggatttcgtcccctaaacagacggcagccgaggctgcagagtatttcagacgtgtagacatgttgttgcgagattgacgatgagaggtacggtaagggggtcgtgattgggatctaccgcgtcaggtcaggtagtcactaccagctaccagcacgcgagtaacgagttgtcgctcagcgcttgatcatcacttgatggagcgatctcgagtgaatctagggcgatcaaggatgaatgcgagtctcgagaattgccgaacctgcacttgatctgactcgagggcaaagattaccaaagcgactaaggatgacagcagtcttgcagtttatatcagatcctccatcatagaaggaggcagatcggcagaccgacgaacaatctgaagaccaaatcgatcaagaagcaaagagcgagtctcagccgattagccgagatccagggagacagccgaacgcaggaccgcgactagcagctggccgtctggcacggcgacgacaaagagagttggaggaccaacgatggtcaacggacaagggacaacgagcgacgagcgagattcagggacgaagcgactgtacgcgattgtgatgtgggttgatccattggtgtccatcttgtcgaacagccagagacgacaccagcgtcagacacgacaacacaataatactgcatcacatcgcgaagacggggaagcgatagagcaatgcaactcgctttgccaaaccacggccatctcctagtctgagcatgtttcaaaggtaggagtgatcccatctctgatctctcgaaagaactcaaaggaccctattccccatcgcgatttcacccgttgctacacggtcgacgggcacccgaatgatgaaacgtgaagggcgacggccatcacttgaagcgcgtgagagctggacttggatcgcgcttctatttgacaagatactcacctcggttcccgttgatattcgtcatcacttcaaaactctgagtactggccgctggtacaatcgtgatgagtgtcgtcgtaaatgaatgacgaagtcgccttgtactcgagagcaggccggccgtaacgcacagctaatcggtaactggattgataggcattcgaaaaggatcacgatgtccttacaggtcattcgcttccataagtacaccgtcacccgacaaggcaagtcgccattcgggttgcgccggctcaactcgtcctgttcgggacggccgctcgtgccgagctttccagtcaagggctgatgggaaaagtggatctcgcattcaatctttagtattttacaagactgctagtagctatggaatcgtcaacatgaggcctctgattcgtgagtagcagctgctatgcgaaaactgcggttttgcgagccgaactaaactcgacactcctgttagctggccgtgagttctcaactcgtctcttgacggtacttccggttgccgagcgctagatcgacgtacaaccttccagatatactcatatgtccgatgagagtggtccccaggctcgccgacctctcgccggacgaaatcacggacctcttcctctcggtccaaaaggtcggcaaggtcatcgagaaagaatacggcggtcaaggtctgaccatcagctgtcaggtaagttgctcctcacctaccgctcgattggagaccaaagactcgcagtctgactgacttctgccgcgcacctcgaccaatcaaggacggatcggcagcaggacaatccgttccccatgtacatatccacctgttgccccgtcggacgaccgactttgggggacagaatgatgacgtctatccagctctcgaaaagaacgaacacgagctggacgataatatggccaaatcgaccgctagaaaggggacggagcgcagcgtgatgacggtgcccaaagacgaagacaggcagtgcaggacggacgacgacatggcagaagaggctgaacgactagctatcctattccgaaacgaataacgggacatacgtgagagtattggatcgagggcgactgtgacgggacaggggaacacgaacgctttgccaagcgaattacatgccattacaaagctcaatgattgacaacacggacacgaccaaggagctcatacgtacaacatgagcaaccagtctctttgcgatgcatagatggtcactacagcttccgatttcgagttctcgatgccactaccggtgcactcgagttgcagtagtcgagatctattggaaggggaaagctgagtaacgggaaagcgctagcggagcaagcagggacctaaacctaccttcacgctcaaggccgggaacatcggtgtactttcggtccttggcaccatggtccggacctcccgattgatcaagcggaacgcgactgtacccttgaccatggatgaggcgatgcctccctggaacctgtacaaggggttgtagcggagctggccggtgacgatcttgcttgaagatctgaaggacatgacaaaatgatagctgttcgtaaatttcgatgatccaaaggccgccgattgaagcagagtcgcgggatgccgtacttctcgacgttggacctggctatccatctgaaggctcgaccgatgccgagctttatactcgagtcatctcctcgcccggcgagtaccccctgcgccgtgaccctggccaaggagcacgacatcaaaggaacgcggctcgagaagcaaggagggtgcgtcaggtggtctaaggaggatggtttcgcccgggccggctcagtggtcatggcgattatcgtgctagtatagccgatacaccggggagtattgtgtctgatcccccgtgcgattcagatcatgtcgctttgggctctttgcctggactcggtgtctggtgattgaggcccggaccggccggtgtggctgggttcagtgctcggggcctcatagtatgacacctataaatccaatcaatcactttgtatgagtaaacaattcctctcccgctctttcgaggtggatccttcaattccgttggatgtagctgtgtgacggtctataagcatttgtccaaatgctcctacaggatttcttatcaagcaacctttgcagcaagtcgcaggcgttggaaacccgtgcatgtcgagagtgttaagacgtcaacgtggtctttggcagtaatctatgctgtggctgccacttcgcttgacccggctgtggacactactaacacatcatcgatagggcgcggtctcgtggtccttgacctacacagcagacacgacagtgatcggggaccacaatattattattgcttacaaatgtgaatagataactggaggcatgggtcgatcgctactacactgatatgattgacacgattgactgcgtctcaagtccttctgtttttgtttggtactttacttgcacgcgaaagcgataaccctcgggcacggctcgggtcagccctcgacctgtctctgctccacgcgaagtgtgtgatgagagctagctaggcgagagcactaggcgaacaaaaacgtgaaaggcaaatgccttagctcagcgtgagtccgatgttgatcagaccctggcgacgtttcacttgagcgtgtttgttcgtcaacaaacccgcaagcgatcgcgttgattggcaaaggagagaccgcagttacataggaattgtcttttgttgtcagcgtccagatcaagttgggttgacactgggccgcccgctcgctctcgggagcaatcgtcacggtgaacccggaatgttgatgatccaatgtctgagatctcgagctcagatgataaacaagcctttccgccggtaagctcagcgaggtcccaaattctgttgttcaaccgttcgcaagcctcttccgagttcggacgttgttgttcccctcatcagtttcctccttttttcttgttctgcgagacgatctgcggggaaaagccgcgtctgccgcggatcctggcgcgccaaatgactacggtcggggggaggtcgacgtcatgatgcgtgggtttccggaccttcctctttgtttattgttcctccctgtgtctcgtggccctgtgacactacacaaaggctttttccatgatcacacgcagtcgcagggtctgtattgactgaagcaagctggtggaaagaattgagatccttgtttctttgtgcccgtcgcgtcgtttagtgtctaggcattccagtcgtgccagtcggccagtcacaaatgatcggtgtcagacgatccgtggcgggtggtgatgaatctggttcaagtagattctacgcgagtatcacgcgcgtcgggtatcagctctttggctgtgcaatgccccggtgaactgactattcatatatcgtccaaaccagatttgatggatctacagcagggacctgttgcgtctagtccgggctgtgaaccactctgatcttttatgacggtgctagcgggaactctctgtatttcgtctcatgtaaacggtctgcatccggggatgtctccgcgaaacctgtgaggggctggcgggaacacgcgagtgggagagagaggaggctggtcaccatcggatggtcgctcgtcgttcggcgtcttgcaacgaggcaatgttgcgactcctctccctgtgtgtgcgtacgtgccggctggatgtgtcacggaagtgttgatgcaacctctactcatcgtgctcgttgatctgagcctgacactatcgcggctggcttgtgttccgaatctcctttggcgacgcttctctatccgcatcgtccgtcaaccgtcagccactttcgacctggtcgtgccggttcaggccaactcaaatcaacgactcggaccaaacgtatcaacgacatctcgcaagactcgttcatagagcatttccacattcgaccggtctggattcagctgtttctgacacgggcagacggcctcaacacgctctttagtttggcatcatcacgtatcgaccatcaccggctaagcctaccgacttcgcacatcacaaccgtgctccgcttctcgttctcaaagctactcgagacaagcacagtctgacaagtcaacaatatacgtcaagtaacttcacttgtcaacaattcttgctctggactgtcaccgctattaccttgactcgcaaacggtcgttcatgatcccggtccacaagttactctagggaattgcgttctgcgtttccaccttcatccgacagctgcgtcagggtcctttggtagagttatagagtactgtaagcagacgtctcaataccgttgttgggtagctactgtccagctcactcgcatcattttgcctaatcctccttaggcttgtccgttgtgtttcagtaacaccacactcctttagatatacacagtacggctgttcatccgggaaatcccgacgtcgtccccaaggctagctaccttgatcttccaggaagaactgggccatcggcattcgggtcctgccgtcgtacggcctcgtaccggctccacctggcttgcacaacatggctacgattcactcatcccgagatgccttcacgtacggttcatcaccgatcaacaccccttcggacatacgggagagagactctgcgtcgcccgtatcatcctacggagacgacctgatggaaaccgacaaagaggacgagctgaccagcgaggtcgaccggagtttcagccagacgctctccgtctcggatgcctttgagtcggttccctcacccctcggcaaatcccataccgctaccgcgaacaagcgacacggcatgaccttacctcgtatgataccgtcgatgctgcacggagcagatgatgacgacgatgacgatgaggacctcgacgacgacgcactgcatggaaatggctacttcggagcgatggcgcccctttctccgaccggaggtgcccgtcttaccagacggccagctctcggccaaggctctaggcagaggacaactcagacatcttctcggttgggacagcttcagcaccgcccttccgccttcaccatagctgatgcaacgtcatccaaaccggaagaccgtacgcgacggacttttggtcgagagctgggtagagagaacattgtcaacccagagcaaaggtcccagctggcggctcgaccatctctcaagctgcactctcaaagccagatagacatcggtttcaagatacccaagactgcgtcattatcgggcaccgtgagggcttcggctggcacggaaaatgaagaccctacgttcagacctgtagcggtcaagacgagacagcccctaccggcgtttactattatgcagaggccctcaccgaagcgtggagatgtgagtccacttgcggtcaaaattgtttacacactggcactgacatggcatcgtttcacagtccgcccccatcttgagggatagagacacgtatgctagcagacacgctgtcaagcgaaacgccaagtcttttgccgataactgtatggacatagactctcctcctcggatcggacacatgcgaacagacacgctgcccgagtctccgctgccgtctgggaccccattggccggttcaccgggccttggagattttttcggcagtgatgcgtccccagacggcaagatgcttgaggctcggagcgctcgagacgaacccatgatcggaagtgggacggagtcttccccagggtcagtcatcgattctccatctaacccaagaatgggcggcaatcccggcagagcgttcgaaaaatcattctcatgcggcgttgcgggaatgggctcgctttacggcaaccgcgtctcatcgaaccttgcgtcaagacgtcgcgaaccatacaacaagaggccgctgctgattgcgaccaacacggcccatgagatcccaactcacactgcgaccgcttcggcgctacctgtgatggatggcaagtccggtcaacccgctgccatcttttctttggcaagagtcgcacggactggcggacagccaccgatgcgtcgagcccattctgtctgccatgaaggtgaaggtggtgaaaccggtcgtgatcatgaaggcagctcgcccagtctaggctcaggctccaataacggcagggttgtcagccatatcgaaacgggcacatccggtctgcaagccatccagcatctgggtggacgtcttacacctgatagctttggctctgtagacgcgtcgagatcaccttatgcccaggcaggtctacttggcttcggcgccaatgaaatggaaggaaaagtcttgccatgccacagtgtcaaggaggatggccttgtcagagtgaaaagagagacagtgagcccagaatagcaagaaattccgggaaattcaatcgatactgaaaccacttctacaggtacgcgacctacttgaagggcgttacgccgggaagattagccgctaccatattatcgactgtcggttcggctacgaatacgaaggtggacacatcgacggggccctcaatgttaacagtaacgctgctgtcgaggagttgctcctgacagatggccaaggcgtccacgctcaaggccatgagctcccgcggccttctcgtagcggtgaggctcacggtgctctgcctgctatcattatcttccattgcgaatttagtaacaagcgtgcacccgccttgtgagtagcggacctactcgcgcagcctggtaaggatatggctcatcccctctcctcttggcattatagtgcaaaacactttcggtctcgggaccgctctgtcaaccagcaagaatatccgaaggtccactttccggaactgtacatccttgaaggagggtattgtgactttttcaaaacgtgtcccgtacgttgattctaatatgtcccgccatcgacaaagctcatctcagcgacttgatctgcaggaaaaatgcgcgccccaagcttatgtcccgatggatgaccccaaacactgcgagcgccgcgacaacaacttgcacgatttccgcaaattcacccgtacccgatcgttcacatacggggagcctcagccgccgacacgtcccgcccagccgtgtcagccattggctttcgctcccgccaatacgcttctcaatcgccgggtgacttcggtgatggaggaagaggacgtgcacatgacgtctccagtcgcacagacgacgaagaagcccttgatggattgggacagccctggagggagtatcgacggtagtccatgcgcaaggtacctaaacacggcccgccccggtcaatcacaggaacccatctttggatcgaccaaacacagagttactggagttagagctttgggtaccgctcaagggaaaagaaacttcaatcggacagcatcttatgccggaacctccaactcgtgattcacgcactgtcttcacaatctcgaccgttgacacatctttctcgacccaggtcgcaactgtatctttaaccttacccaccttcctcttgccttatgcttaatttgtcgtcatttgggcaattgctgttcgcttgttttttacgaggtctatatttgtcatctgctaccttgtcggaactgtccgccaagcaggtcttgtataagatcgacccacaagggcttacaaggatcatacacacgaaacaccctaaatctagtattgtccggcgatcagcttctcctgcggtcgcttctcgttgatagcatcgaggttgccgtgcgctgcgcgattcttgttctgtagatccttgaaaaggacgagcaggtcatcaatggcagattcggtgatctggtgatgtacaacaaatctggagcctcgaatcaccaaaggcttttcgagcgcttcgccggcggcctgcaactccttgagggggattccaaggctcgcaaggtcgacccagaccatattcgtctcggtcgggtaaacgagcttgccaccaagcgcttgaacgccgtcggccagtctgcttgccaaggcatgagtaccgacgagttttgggaaatgttccgtcagggcgacagaggcagcggtggcgatggctccagattggcggatcccgccgccaaacattttgcggaaccagcgggcgcgatcgataagaggctttggcccaacgagaacgctggacagagatgcaggtccgttttagcgacggaacgacgtgtcgccggaattggaaagaagaaagcgtaccttccgataggagcaccgatacccttgctcatgcacaacgagattgtgttgaagggtgcgcagagttctctcaatctgttccgaccacgtcaaaaggtcagcctacgcagccttcatcatgtctgcgaatcgaggctatcgtcttacgcttctcccaacccctcatcctgcatgggcaagcctcgttcttgacagacacgagctgctacttcccaaatcctcgctccatccaggtgcatgatgatgtcgtgtttggccgcttcctccgaaatcttcacgatttcgttctgaggaaatacggtgccagctagagtgttttcgaggcagatgaggcgggtaggtgctgtgtgaatatcgttacccagttgcaggttcggcagtatgtcgtcttccagcgtaaggtggtgacctagaatgtgaagacggcggaggcatctttaaaggacattcgagttgctcctaccgatggtcacttaccattgcggggtggtagagcgtgagttgtagcctgggaaaagacggcgatcccaccggctgttcaaagcgagacaagatgtaagtgttcgatcttccggattgaagcgatgtctggccgtattcaccctccatctgggtagcatgagagccttgcgttagttctcgtcattcggtccactcgcacatggacgcacgaacctgatggacgtgcgcccgatgatcggtgatcacgctatgcggaggctgagccaaggtagagcgaatggccagctctgagcaagtttcccgcttagctcgacgcagcagttgaaccccaggtacaggactcacggttgctcatcgtgccgctcacaaggaacagccctgattctttgccggtcaactttgcaatccgattctctagctcggtagtggcaggatcgtcgtgatagacgtcatctcctcgggtcgcctggattcctgccacgagcatcgaatccgttggcacggtaatcgtatcacctataacgacgtaaggccatcgaatcagttcagtaccccggacaagacgatggatggtagcagtgtacttgctcctaaagtctcgcgatatcttggtaagctgggcgacattgtgtctaccaccgacctctgcagtaatcgaagctttgttgacggcaataggcatgatggtggctagatttctcgtgatgaaaatgggccgataagaggttcgagcaatggtgacgaaacgatgcgatgatagcagtgtctttgtgaagagggatgtcgacatgaacgctttggaacgtccgtgtctatgcggactgaatgatgatcgtgatctgatggactcgctctctatatagctcctgccgttcgagacgattgtgacctcgtggccgttgtaattatcgagcgctggcggtcgaccatcatgtttgtgagctttgtcaacccggctcgcggctcgaggtggtcatttgccaaaagtgccaaagagcagcagaattggccatcgcgggtgcctcagggtgtgatcgcgtgtagccgaaggtgtcggaagtaaatgatttgccacttcggaagtaaaatgggcctaggatgacacggaaaatggccaataacccaccgataggaatcgagaatggacccggatttatcggtcaaaccggtcatctccgtcgcaccgaccgacccgaagacgacgcccgagacatcgtgaaacagggcgaccccgtaaaaatgccatcgatcgatcggtcgtcgatgaaacgtacaaggatgttcgccgtcttccttgtggatgcaacctcgtgccttcctttgtgttcctgccctgctactttgaaacacgtaaggcgacctcgatgccgcctcgcaatatcgagaccttgcatcccgaacacaatcttgacgagattgcacttactggtctttctcgccgctgtaaacatccgctataaaccccttcgttattgatcttaattacatgcacagaacatgtctccccttcccactcccataaatatcggcaacgtcgcagagtcggcggtcggcgccgtcaataccggcgtaggcgtcgttacttcggtcgcgccagaagccacgaaagtggctggcgaagcggctcccatcgtcgccgatgtcgcccaaaatgctggcaagatcgatctcgagagagtgaaccacaatctttacaatccctcagagagcaaagctgatccctccggtcgatttgatccgctggtcgcccattacagatggccatggacatggcaaagctgaaactagtgagtctgatgctgtctctacaagttcacgtcctcctgtagcttatgaagggtctgcctcatcagaaagaatatatcgaacgtaaggatcactctacggctttacacgttgggagttcgtcgtttctaaatcgccttgcgatcgctattcttgtctgcaccatcaaagtcaccttgaagtatatcaaggcgatgctcgaagctcacagattgctcgtcataatcagtaagtcatccttcccgaagggatcagatgtcattgtcaatacggatctacctcgacagtcttggtgatgcttggcatcctattgtatctgcagctatctcggaagatggccaaggtatacggatggtttgcatatcgtcatgagcttcattgcggcaaagcgtggctcgatggactggacagaaagatggacgctgaacaggacaaaagcgaaaagacgggtcttacattggattccctcaccacagatgcaagggtaaagcgggagattgaaaagaaagaatgggagctaaagaagagcaataacaagcttaaagcactcaacgagctctttatggctcagtccgttccggaccccgacatctgccgagctggaagacttcgaaccgacctcgagctttactgtcgaaggaagaaactccttgaccacctattgcatgtgcccaaaaggtgggtaatcaggctctggtactacgctgcgtggcggtggtgtagagactggaaagcgcatagacgcgattattccgatcagatggaaggcaagacctagaagcagacagcggagaaaaaagaataacctcgtatgtacaggaaggtgttcagaaccgttgtattgccctttcgcaagggtctctatccatctcgagctacgtgtactacgcctaaaaaaccgaaccaatgggccatttttttaggattggttcgttcagctcatcccctcgcccgtctcttccgttgagacgaattacccctgcccaggcaatcatggcagcgttgtcggtgcacagcgcagcctggaatctaaaatcagctatgaacaacaccgatatcctcctggctccagactcaccggcgggaagcatattcgaatcggttggttcggagaccgcttaaccagactttgtacaagcctgtcccgtgatttgtcgtgtctaagctcctttgacagctcgtaagatcgggttagtgcagggccacttactgtgatctgaggtagctgttactcgccacaccgccgctagccaccacagtccggactgtgatcgggtcggaacgattgtccccacctttagcttccagacggtccaaagccatgttgaccttgtcgatggcatgttgaacggcagcctcctggaatctcctggacattgcccgagcaatgttccgcggaattggcttctgtagatttgggaacagcttcgcagtctccttgtgaacttttgtcttcagtccggcgtaagaaaaggcaagctcttttgggatgggaagccgcagtggaggtatcttgtcatatatatcattgcctggatccggctctgcgtaggcttccagtgacggtcctggtccctgcccctccagccaaggtatctgaagcagcttggctgtcttgtcgaaggcatcgccaatcgagtcgtccatcgtgtttgcaaggatctcgtaatgatagtgatatggtttagtctccgtcgtcaggaccagcatcgtatgacctcccgaaatcaagagattgagaacgggaaattgaggaggttccgcttccgtcagcagcggtgtcagggcatgtgcttgcttgagcgagacactcctgtaaacatgattgtctcatctgttgttatacgtaagacactcaccatatggtggattcctaccagcggcttgcgacatgcgaccgcgagagctctcgcagcatgtactccgaccgataaacaaccgaacatcccgggacctgtcaagccattgatttcctggtcagctacggcatgatcgagcaagatctaaacaaggcttgggctcacctcgagtatatgcaatcgcatctatgtcgttcattgtgagatcggctgcgtctagggctcgatctatggccaatggctaatggtttaagattcatcgactaccccgctatgaagccgcgacgatcacatgcttacaacaccaacagcatgactgtcttgagccttgataggatgaataccaccagagcttgctaccagactaatccacctcagcaaggccctatactggtctgtcgtgctgaaaatcagcttaccatgaacatggtgttgtttttcaactatgttcgccaggatcctccgatcagatgtgacgatggctgccgccgaatcatcagctgatgactcgataccgaggacccgaaaggggcggagtaatcttggaagcactctgacgctcatatctcaagcgtctgcttggtatacatcatgtcatgtatgggctgtagagctgtagatcagtcgagctaccgaggagaatcagaaaggctcgtatttcgaggaattcggcactacaacgccgccctccggcaagctgaaccggaagcgaaaaaacttccgaggtggaacatggtccgcaacgaagcagatacgggggcgaggaatatattgtattaagggactcgtaacgattggtctggcaagcaaagtgggttctgtacatcgagtcggaatgacataaggtaatgaacaaattcgaaagttgaattggaatgaagcataaaaagaaaaggcggggcgaaaactcgccatccaccgccatcccgtcgatcaattgccgtcttctgagccagacccatcatcctggcccatgccctgaccatcatcagattggctttcggcgtccttctggtctgcagcttcaatctcggactgtttgagcctccgggcttgggaaaaaaaaatctcgaccttcgtcttgcagatattctcgattgcataaaaattgcctgaagacagaatatgggccgtttgatcagcggtatttcaatctctgcctactgggtcgcaaacgaacctcttggaatcatgaactgtcccccttgtgctatgatgaattggtgtcggtgtacagagactttaacgcagcccttgaagacatggaaggcctaaaaccgcagtgtcagtcttcatcgctgtcgagtatgatcattgcgtccacctacataggcgttatcacgcgaattcttcgaggccttttcggcgccgacaggaatatgcagtactcccgctgcgaaaaactcgtcttccccgaagatcttttgataacagaagttggcgttcttgatcgcctttacacggaccatagcgttagtgcaggcgacgcctagaacagccaggactcattagttttgatgtaaactatcgccgggagaaccgatcacttacgtcgtaattcttcctcctcagtagaacctcccggtgaccactttgcgatgatagcactcgcttctgtctcattctcccacccagtgtaatcttcttctccttcttcattccctgtgcggcgcttgtttccggttcgcgggggtacgctgtttgaccctgctctcttgcgtttgaggcccgtcttcttggcgcccagagtctggacgggttgctctttcgtaagccaaccctgtaactctgggacgatgtcggtggcgtcgcccttgtctgcaattgtgttccgcttcaagaggggcttctcaccaagccagtacctcagtggagcgtgtcgttcagcggtcgaccggagccgtcctcttgtgcgtgcggctagattgtgcaaatcggcgtcagacggtcttcactacattttccatcatcgaggcaagtcaccttcatctacccgctcgaccctctcggcggcaagctgaacagtactccgacctcgcggccttggttctaatgaggtttctcttgcagccgctggcgtctctttcatttttcgtcccctcttggccttagcaacgggctttgaccgggcattgggtttctccgttcccaatttggatttcactgcgatgacttcctcctcgcgcatttggtcaaactcgtcgacactgtgttggtttggggacgctcgggacttctttcccttgcctttgcccttggccgcagccgcggtcttctcgcgcgattttgcagccgcggcacgagtcgatgatcgacgagacgacacctgctcttggtcggcatccagtccgccctgttcttcgccgaacccttcgtcaaagtcgtccattccaaaggctgggtctacgacattgtcgttgtcgttgtcaagagcatgatcatccgcttcgtgctggtcggtatccgttatggtctcgccagcttctccgtcgaccgcaaattgccgccgtcccgcctcttgaccagacgcacccgctcgtctagaaggtcccgcccttatactggctgcttccaacccattggacgcctgggcatcagccgtcgaggtatcgttgagcgatcgcagactgtttgctccaccattcgccttgcttaatcgcttgctcatagcggtgaatttccgtttggatgcgttgatccgcttggcgtcccccgctttggctgcgcgtacggatgggctctccgcgacatcgccttcatcatcatcatcgaatgcgttaccagagtcgtcgccctgtagctgatcggtccggagtactacatcatctaaaccgggatccgccaactgtgacaggacggggcgtgatgaagccgttgcaggcgaagccgatggccgtggtcggtgtgggccgcttcgccgtttcgctggagattcgatgtaatacggcagggaagatcagtgctatgatcaggaatcaccgctagaacgtgtctttaactcactgggggtatccacaatggtgctgatgtccatatcctcgaagctctgactggtcgagccattctccatctgctttcctttgcctttgcgcaagagaccgtcgtccaaaagactgtctaccgcatgtcctccagtctcttcctcgtcttcatcctgatcgtttccgtccgctagattggcaaggctctttcttccgttgccgttggccgtgctgttcaagacgctgcgcgaagtgacctcgcttcgaaccgtagctcgggctacggaacgctcgctgactagtcctgccctcgtggtagtagtcctcatggaatcgaagtccatttccgtctctgcacgaggcgacgaagctcctatgaagaaggtaggatcttcgaatccgtttcgcatgatcggaacgcccacgggcatcgactttcccgtacgactatgaaatatatcggcacgcgaaagcagtcggaactactatcagacgacggctttagttctcagaccacacgtcggactcacgttccaacattctctggctctgcattgaatccgatatagcgggcaggcattttctcccgcctgggggtctttcggggactaacgttggccatactgtcgctgtcaactcctatcgtgatgtgtccatgtgaacgtggagatcgactgatacgtaggattccagcggctggcgggatggagttcaggatgaggtgatggttgagagtctatccttcggtctgtcaggaggactgcaagttacgatcgagggtatgtgcgagtcgacatgaaggtatcatcatgagttatgggaggggggttggtacgaggacgaggttgttgtgtttgtttgttgacgtttgttgacgcgcgcgtctttcccgcggcgacgacaactattcagatgatcagatgccagatgcaaatggatggatgctgttgtgagagagatctcgaggtctggtctgcttaggctcaaggcaggcgagacatccgccaacgccccgaatcaaaagcgaactgtacagcagccaattttcgctaaccatgtatcccattctcccatgtgtcgctgggagtcgttcgacatgtcgacaagctgacaagcaggtcgagtcctgcagggtggctgaccatcactctaatcccatcaagtcgctttctcacgcgcgcgaaaaagtggaggaatcaatcatttagggtcatcttgcatcttgcacttagactcgcaacttgcaacttgttcatcatcggaacggtctcatacaggcgatagtccgcaggctgagagctcgaataaacgcataacatatcgcactgaagcattccgtgtcgttgtatagtcccgtcatggctaattcgcgcttcacatatgtgcgcgactttgagctcgccgataaagtcctgcccaacacctggatgctcgtccgaattgacggcaaagggtttcataagcaagttgtcgatcgcgcacggtcgttgtctccctgacacagccagctaagctgtggaatcgtccaatgacaggttttctacaacccacaacttcacaaaacccaacgacaagcgagctctcgacttgatggaccgagccgccaagcaggtcatgaatgaggtttcggacgtcatcgtagctttcggtgagagcgacgagtataggtaggtgagtaatatccgattacaagatattcttactgaatcaggttgctgatacatctcctgtgcgccaatagttttctcgtacgaaagcagtcgaagctctacaatagacgggagaggtaggcggtgatccttgtctaaatcgtcgaacgatatgttgattgccggtcttacaccctagcaaaatattgactttgatagtctcgctgttcacatcggcgtatgtctaccactggccaagctacttcccggatctcccgctagcctatccaccggttttcgatggccggctagtcgtctaccctggggaaacagacgtgaaagactactttaggtggcgtggtgtcgacagtgagtatctcactttccaccggcactcatctgagtagggctctggctgaatgttaacggcacggtgtcgcgcagctcacatcaacaatctttacaatacgaccttctgggccttggtgcagcagggctcacagaccacgaccgaagctcacaagacactctctgtaagcattcgtagacatgaggcaacttctcgcaggttctgaccggatgaatttggactcttttcatgcagggtacgttttctaaagacaagcacgagatcttgttcagccggtttgggatcaattacaacgagcttccagcacaatatcggaagggaagcaccctggtgcgcaagccgagctcagctgtcgacgtgagcggtttggtatactgtcgatcgataagaccaaccgaggctcaatctcgactttttgtccccccccccctctctttccatatagaacccgccaaacgagtcgattgaagcggaggccaatgaagccagcaacgagcctgatggctcatcccccgctacatctgcatcggaaggagacaagcgacggaaaaagaaaaaggaaaaggttgtaccctttgacggtacaaatggagaggtgaatgtaattttcgaggatatcgtaagggacgagttttgggaagcccgtccgtggctattggcatgatttaatgcctgatggtactttcgtctcctcatgtaccgggtttactagctattataggccaaagatgtggttcaccaaggtcatttgtcgctgtcgaggtcgtccatggatgattcatttctgtactgcatggaatcgtcataccggatgtaatttctcagtttgcccccgaaaggcgtccttacgatgttgatcagatcagatgttgacaaagtgcaaagtgcaaatgaagcacaaagagcaagctgcaggatgatgatggggattattgagaagcatcggagcgaaggacatcgaaataaagtcaagacaagtgtttggctcagctcacaattaggtatagtgccctagcgcattcatatcatctagggtcgcaaccacgcattatcgaagaacgtagaaggcaattcgagaatcgcggcatctggaggccggcccagcgtcatcggaactggaatatcattattggagagagtcaccacgggcgaacggtgtcacctccggtacatgacagacatgaccgatgtgctgctgcacgcagtcggtaaaagaaagtggaattcgttgccagagcctgtctttcagtgagcggtgattcctccctatgagcacaaagtaaaaggtctgagtttcatactccggacaggcttatcgtcggacatctgcgcgaagattacacacggaaaggtccaccgggacagcatgggcggccttactttgcaggaacagaccgaggcgtactaagggatcccgttacgacgacgctgtatcgcagtgagccagcatactgctccgttaatcgccaaagtttgggcaggactcacgttattgtactaaagtgatgtgcttcgcccgaacactgcagcaattggctcgagtgagcgctaaatgggatctttcgggtatgctcaggggcgttccccgttatatctgatctcttcaaccggatcgctgatatcgcccgcaattttgtcgtaacacagtcaacgagcattctttctggggagacttgagtgaaatgatcagcggagaacgatcgccggtcgacccaaaagatagcaccccacgaaacaaggatctagcggcctctttctgctggatatgcgcgctggatcaaagtgcatctcatctcctgcgccccgccgcggcgactgccaagggaccgaagccgacgccgatgcaaaggtaccaacagttctcgaatctggactggatacccgtctgcaaccttcatcatgcgggcatttgtcagtgctgttgctggagcacacgtacgaccagttccggcgaaagttacttgcagatcactgacgatgacgatgcgttcggatcgagcccgctggaaatctgcgggagctgtcgactggctgcaatacacgtcaatcagccccgacaaggaactgatttccgagagtcccgaatcactgaggactacgtgatgctgggagatcgcacggccaaagaagcgggggaagcgctgaacacggcgcaatggctgtacagcaatcgaaaattcctcgagatcatgcaagagctggacgacaagttcgggtggaaagcctacaagtacagccaatctttcaaagacagatcaaaaggctgggctgcagagggagtggaatgggtcggttccaaagggtttaccgaaaaagtcagtgacacaacacaactccgagtgattgcttgtctgaaaccccttgcttccccagcaaataaggcacggccttgacgagctggtgtgggacgacacgtccagattaatcagacgcggcatttgggtggccccaccagccaacgacacatcagtctcggtattcccgaccggtctaccggtctttcggtccttcacaccgattgacttgctgtttaacccggatcgcgcacagaagcgcagctacgatttacaggaaagccttccgtggatccgggctccatatacgatcctctcgtgctacaggcgcgccttcagtgttaaactccgttctcaactgcatttcccgatgaaaaacatcgaacgcatgctgctcgatcgcaacgacggcgatttcgaagccgccagcaaagaggcagaatcaatgcagtacgaggagctgcgggcctggttgtcggacgctcggacttacgtgaaaggatggtggcgaacaaatacaaccagcaactcagcccatccggccagcgaaggccatgatggacaagcgcatctgaaaaagcggcctcgcacagcggaagacggcatcgaagaaggaccggcgcgaaaggaacgtaaaatccgtcctaactcggctggctttgcgaccggcagtgtggaggccgaggcgactcatgtcacaatcgccagacgatatgaatcaccgagagcgataccaaatcatgcagactttgagaaacggaaacagctaccccccacgactcgctatgacagcttgggggttcccaccacagagcaggagctttcgcgcagcgtgaccgatattattaaggtcgcctgggcgactacaacggaagaacttcgccgctgccgatgccgcgtatgcactcggcaagcgatgagagagcaggaagaggaagccagacaccaagccgaaaaggcggtggagcaggagcggacgaggacgaaacaagaagagcttatcaagttcaagatgttattgacgaccagactggacgagaacgcgatccacccgggattcctcgaaacgaacgatgatgacgacaatgatattacggaggaccctctcaacgaaacgtgccccatttacgatattgatagtggagacgagtcattcagcgatttgtcagaagacaagtcctgtgacgatgcttgaagagatagaagagttgaaaaccgaacgccatacgatacgtctagagcagcgaaaaagagctttccatacatgctcgcccatacttgtatcaactaaaacctgcagctgacctgttccctctgttatgtcgatgttaccatatcggaagtgattccatactgttacagaccatacaaaaatcgtgacaagcggaaaaggaaaacgtgatataccatcaaatcatcagactaccgaaaccgacgcgccgcaccagtccgacttgcttctatgcgtcgcccggcctgatcgcatggcctcaacgagctcgaaaaggaccgctttaacagcatttaccgccctgcttagcgccaccatcgtcttctgacttggcaatgtcaatgccacgaccctcgagaggctgaatgacatcactggagttttcgaggttcttctttgccacgatgtggtagatgtctgggatagacaaaacgtcggaattagcagatgtaggaaggagcggcagtgagatacgcaccggacaagatgttttggaaggcggcctcaacattggaagcgtccaaagccgatgtttcgatgaaggacaagttgttctcggctgtatttacaatccggcccgacatcagcatcgcggttacctcgcacggccagcggtcgcgatgataactcactggcgaatgctttagcttcgtccgtagggacggctcgcagatgcttgagatcgctcttgtttccgaccaacatgatcacaatgttcgaatccgcatggtcacggagttccttcaaccagcgatgcacgttctggtatgtaggatgcttggcaatgtcgtagacaaggagcgctcccacggcacctcggtagtagctgtgttggaagtccgtgtcaatgacagtttgtacatctaccaagtcttgtaactcacgcagacgtgatagctcggtaccgttcttgacccgctgttacatcggagggatatgatcagaatgtcagccgtatttttctccattgacgaccaacgaggccgacttgcccgtgtcccaaatttgggccttgaccgtctttccatctacttgcacggatctagtagcgaattctacgccaatggttgatttggagtctagattaaactcgttcctggtaaaacgcgaaagcactgtgattgaaaccggacatccgcggacaataagcctcagattgggtttcgtgtcacctctcggcccgtgactcgtgctacccacagttcctagagacagtagcaaatgactttgtgatcagatgatcccttgattgtcgattgaaaggtctgtcaacacttacgactttccgacacccgagtccccaatcagtacgacctggtatcatgtcgcgttatacccaaggttgtggtgaatgaatcgagagcgcggagatgagcttggtatggaggcagttcaagggatgaatctggcccgtaccttgaacagaaagtcgtagtttgatccttccgtcattgttgctctgatttcgttctgttgtggcgataagatacccacccggtatgagaagcttcctttcaagcccaaacgatgattcagccctcacctgagtgaaaagtctcgacaggatctagcggcacgattggtatgaggtgttgagcgacgcagtgggcaagcggatgacggataggtttagcaatatggtgatcccgcttcagcgttgttgaccacctgcctctgatggtggacccagacccggtcccggtccagcgcgtggtcggtcaagtcgagggtgtcttgcgttgtcgtggtcacaggcgaagctggttcgcggcaagtccacggctcgagacccgttccttggctgccgccctaggtaactattctcgagtcacgtgattcatcaatggatctctcgtcatcacgaagactggcactgggacgcgacgagaatgaccaaacgcgtcggcgagcgacgttcgatggtggaccatcatcttgcatcttgacgctcatttctgttgaacggcccaaccggccttcccgcatggttccaaggtactgaaactgcaaccatcttgcgttcgcctggtactcaacccaatcaggccaagaccgatcgcttaccgtcaatcacgagtcgctgttcgaaatcgaaatagaagagatagatctcgatcgtgaatgcgaccccggacttgaccgccctccagacgagcctgtcaactccccagactcttacgttcccactatgactcaactcctcaagttaaattacgctggaccgattgctcccaaggggacttcagcagagagtattcgtgcgagactcaaggtgagcatagtaacactccttgcgcatgtacgcaatctaaaaccaaaagaatgagcaactgatttgatcggccttggttcttcacttcaggagctgcatgagaagctgaaggccctcgatcaggaagagactgacatcaaatccttgaatgctgttcggaaacaactgctcggcaagccgatctttttgcacaaggagtgaggattttctcttatgagtggcgcgccccttagctcaagctgagcgcgtatactgctacctatcctcagcaagggaatcaaggtatactgtgcatgttgtctcgcagacatgcttcgactatatgccccggatcctccctacaatgacgaacagctgaaagtgagaggtccgatcgagattgagagagacattcactgacaccttccctgtaggacatcttcgtcttcatgctgacccaactgtcacatcatctgagagccaagccgtccattgctacgaattcccgcccgaaatcagattcgatcgccgagacatcgtattacgcagaatactattacctcctggatagtctcgccacaatccgcagtatttgcctggtgacagaactgcccggtggagaagaattgactagggactggtttgtcgggctattctccatcgtcaggttcgcaaggttcttgggcctgtggcgagtagatgccagctgatgcgaatctcactatcagatcggacatgaacaagcagctgttgcgcttgctacaggatattctgacatctttactggacgagtcaaacgctttacctgatggactgttagaggaggtcctattggctcagatcttggctcacaaagaggtatgttggtttgtcgtcgtgaaaggaaagccacagggtcgaaacgctgagtcgttgtcgcgccagaatcccgcgcatccggcctttgtactgactgtcggaattatgagaaactcggcgcccaaacttcagcgccaactgcacactgtgattatatgcttcccttcttggcgaaacctgaccgctgaagctgatgcgcatcctctttcaaagcatatcgccgaggttcatgagcgctacggcaaagagccttcggaggaggacatgcttgagcttcaacaagcgcacgatacgttatgtctactattcgcacacgcaccggaggtgttgcttaacgtcattcctcatctggaggaagcgctacaagggggatccttggaacttcgtgttttgacgacgaagacgcttggctcgctgtttggatcacccaacggtgctacctttggcccgattggcaaccagacgatagccgagtcttaccatagcacgtggcaggtgtggttgggtagacgagcagacaaggccgtacaggtccgtgttgcctgggtggaggcggcctgtaaagtcctgatttatcatccggaattacgcttgtctgttgaaggtatgtgcaagatggggcctataatcttgctcgaatcatactgaatgaaatgggttttgttcttagagggtctggctgaaaagttgacggacgtcgaagacaaagtcagagcattcgcttgccgtaagattgggtcacttgattacgaggtgtcggcgcatcacgttcgtgtcgatacgttgaagatgcttggagatcgcctgagggacaaaaaggtacgatgaggtcgtttcggtgtgaagcgcgtagtcatggctcactcgaacgatgcacagcatggcgttagtgagcaagccttcgaggctctgggcaagttatacgcggcagcatataatgaaatgtcagtgagacctacactcagcttgacgcccgatctgtctgacgtctctccctgacattgacgccgctgactttcatcgaatccatggcagtgaagcaaaagacgctaccgcggttgcgcaattcggttggataccggagagcatttacaaatcactcgcagacaatgcgtcagtaactcaaaggtgtgatggccctgatactgcacgaccgagcacacgaaagcattctgatccttcttgagtccggcagagaacacgtcgaggcggtttcggcggattatctcttgccactgccaccaatcagagcggacgcagacgctgaagcgcaatgggtcgacagactcctggtggtttgtggcggtctatcagcgtcggctttcgaaagcttaatgtccttgacaaatctttcagacccgtaagtgcaaggaaatcctgcatcgctgtcgttctaactctccggacggtcaattcgcaaagagccctgcaaccgtgggatgtgtatatcaaggcgtgcgaggttaacaatgtgagcggttggatggtaatatcagcctagctcgatcgtggctgagtcttgtttacaggggggtatcatagatcgcgatgagcaggatgtaaaaaaacggttggaacaaatcatccgatatctctgttagtacaatctccatgctgagagtaaacttggtcactgatacgcctgtctcggtcagcgagtcgtttcgtcgagccacatcgaacagagaaggctttgcaggcgttcgccgacctgaacgactctcgactatacaaacacttaaagacgatggtgaacctctcgacggacattgaagcgctcgtcagagctagggcgagtatttctggtttgttagactcgatattgcgggaattcactaattcgccgtctgcaaactataggtcgacatgatgaaacggctcgagaactcgctcccagacgcggttccagtcttcaagatccttgccaacaaggctagcttctggatcatcaaccgctcttcagttcctcttctgattaagaaggccattcggcaagacgcagacgaatcatcgacgcaggcccaccagatcctcctgtatatcagcaaacgtcgagcgctactcttctcaacgcacatttcggagtttcaaagtctactaacggacaagcggccgcatgccccgatcgatctggcaatacagtgtctggctcaagctgcgatggcttcgcgcaaagaggggaatcctggggccaatctctcaaggtacgccttctctctttgcgttgcgaggataaacctgactctacagtccttcagccgggtttcagatcgcgtgaagaagctttgcgatgtcggaactgcttcacaggccaagtacgctgctcgacttctggctcaaagtcaaaactcggccgatatggaggatgtcgttgcttcggcgattgaagcactgaaagacagtacgagagagtcacctttgctagctcctctttgcgctttgagagaactcgtgaaaagagatgtggatgtggtcaagccaaaagtcaatgcaatactcgctcaggtggacgcggagtttctttccgtcgatgtgggcgctatggtatgtcgtcgctgtgggcgaacgtgatcttacatcctaagctgaggacgcgcaacagcagacatcggatgagaggtggcgcaattggactgagctggatgagcgctcacagacgaaagtgctagctctgaagctcaagatcgaggcatgtctaatggggctgcctggcaaaatcacgatcaacgcccgccataaggaaggggtacaagctctgcatcagctcatcgcaaacgctggccaaacgaacgcgggagttcaagcaaggtgagaggcctcggcttagactcttctcctgcatcatcctaatttgtgtctggtaatagtggtgctcttgcaggacacctccgaatggttgccgcaatgggattgaccaaaatggctatgtatcgtgaattcgatgagatgataggaagcgcttgtttcgaagagattgcctttcaaattcaggtgagaacatgtttagaaagctgttatctccacttgagtttcatgccgattgctgacttcatatgctttatgtgttccaggatgaatattatcccgttcgctacggatatctgcagaagctgcacaaataccttctgcgacggagacatgcggccaggtggtttatactgcctttcctggtggcccatgatgtggagcaggatgtcaaagatatcgtcagtgggctgcggatcgtgcggatcgtgcggatcgttcgcttgctaaagatgacctggaaatacagggtgtcaagatcattcgggatgtacaacatcgtctgcctgacagtatgtcgacttgaacttcgttttctgcctttccgaagacagaggtgttgatttatagtggatcataccttcaagagcaacgtctggatatgatcgaaaagccgtttgttcgactactttccttattggctcatcatcccgactttgagatgaccagcagtgacgatctgctggctatgagccagtgagtttgcctctcacaacacgcccctgtgaatcatctcccaaagaagatctttgttcaggtatatcaacctttacctcgaggaggttgccaatcagcgcaacgtcaacttgctctattatctcgccaatcggatcaagacggtgcgggacagcaaggacagcggtgacgtaggcatcctcagccctttcgagggaagctgacgaccaatcagacggcttggcttacatactgcccacgattatagcgcctttatatgctcagtgaactagcccagctactgctacaacagaaagcacaatctcagcaatggtcgattgatcagtacagcggcaagcacaatttgccgtcagacattttcgccaaactactgaacagcgatgtcagcaaagaggtatgagtgctttgaccggaggctatctgcatgcgtttcattgatcgatgtgtcgcttagatttcgagaaagcagtttctgcccgacgacatggcacggcaattgcaagctctcgctgcgcggaagcccgttagagctccagccggtgaagtaggtcatctttcattcttgtctcgtctaaaatgccgtatgataagggctctgaacctctattgtcaagcagagacctcccaaagccgtcaaaccacgaaaggaacgaaccacaccaaacaaacccataccgtaagtcaaagcgggagatcgggggtcgaattgccgttgctagttctgaccaatctgtctatacgtgcctctcaatccaggaagagaaaacgtcaccaaggaccggagagtggcgatgatacggcaggagaagacacgcctgacaccgatgattatgaggggaattctggagaagagatggtcgtgcctaccagagccagagctcaagctgctaggcgcctggatactcgagtaagccttagtagactcgaccttgcaggtgcgacttctcatggtcccgtcaccgcgaacagaacgggacggcaacaaagaagaggaaaatggcagcaaccacccagcaggatagtggctcttcagagctatctgagctatccggatgtgattgacctctaggacagacaaagcgaagaggacttcacggcggaatcttgtggcaggaatgattacattttgctaataaacaacagatacatcataatcagtctgctcgtattacgctgccaagctagtacgttgctcttcttggcctctaggcactaaattacccatggtcgaccatgcatatgcgaaaaaggcgtcttcaatgcgcttaccttcacccgcgaagcgcgcttccaggttggctaatttacggacgagttgtaccgatatgatctatgttgtgctttcaaacggtgtcgacgacgtaatagaacttcgtacacatcgatgcaggcgtcaacttgatgctctccagtatatccactatcttgaatattagcagaaactactcgcaacgcacaacgattcatcgacattgcaagatggctagcaaaaaagtcttcttggagaaggtccttgctctgcgaccggacatggccggatcagatgagaaggagaaagttgccatttcctccttagtctcggaaacgtctaagatgggcagcgacatcaaggttagcggtctctttgtctagacgatgcgtaacgattgaaacagatcatgcatgtactagtcatactgatgctttccgcgtgtctaggctttggacgccaagcttactcccatcacatatctgcactccctccaaccgacactggctgacgtcgctctgtacacagagctgcatcaagaaatggcaagtatgaaggcatctatcggcatatgaaacagtcaggggactgactcgatcaacgcatcgaatagtcccgtatggaccgcgaaggctactattccttgccggctgtgacccgttattacaatcatatccaacacctccaatcggtcaatgaagcccgaacgctgctcagagacactcctttcttgctagtctcatttgacctcgacaatatgcctcccattgaacgtaaggtggaggtcaaagagaagaagcccaaaaaggaggtcgccaaagcggtagagaccgatggcaagaaggctaaagctgctggagagaagcccgcacctgcttctcaaccggaggacaagcctcaaacttccggtgaagctgctccggcagaccaatccaagaaagaaaagaaggacaagaaggataagaaggagaaggctccccaatcgagtgagggcaagaaggccaagccggccgcagaacccgccgccagcccatctccaagcatgatcgaccttcgtgtaggaaaagttttagagggtgagaatctccccagttgaagttgtcatctttgcgagtgcgcacctgaccacctttcggcatccgatcacgcacagtttcacgacatccggacgccgacagtctctatgtagaggtgaggttatagcttggcccgcaaagagggaaatggactgaatgactcacgtgaaaatcaatcgacttacactaccagaaaatcgacatcggtgaggagactggtccgcgaactgtgtgttccgggttggtcaagtacatgaaggaagaagacattctcggtcagagtttggtcattgtggtaagtcagccggctctttgtcctgatccacgaccgactttctgagctgacactgctcttaatcagtgcaacttgaaaccggcgactatgcggggcgtcaaatcttacgccatgctgttatgcgtaagggatcccgactttgaatccgtgttggtgcattcgactaaaggaacgcctttctcaggcttcatctgcggatggcaaggacggtggcttggagtttgtcaagcctccagcagaaagtcaacctggcgaaaggatttacttcgatggcgagaaatatgaaagtgagcatctggcgctttagtgtgtctcaaaccgcctgccaacacaccccctatagaccaaactccggaagcgcagttgaacccgaagaagaagatcttcgagactattcaaccggtacgtttcagtccactacgatgtagcggacggttggccagactgtgccaacatggatgtccagtccactgataaggcctcgctgatgcaaaaaaaaaaaccctcgtcactgcagaactttaccacgttggacactctcgaagcatgctggatcgaccccgagactaagagcgtacacaagatccgaactcagcacggcgtatgcaaggtcgctacccttgttggagcgagcttgtcttgagatgttcatcacgaacaaatgttacattcaccttgtctgaccaaaccaagtcatgggatggatgataatcagtttagcatccgggatacttccgctaaccgctttcccgatctgtgtatgtgtgtgtgtgtgtatgtgtttgcgtggatgggtgtgggccgtgccttctttgcctctcgttccgtgccgtgtcgcctccgcgcatcgcctgcctggtcctgcctgtcgccctgaccggccactcactcactcactcactcactcacgccgtcgccggtgccttagccagcgatatcgcttgctttgcctacacgagctacatgactaccgtcctgtacatcaccatggacccgtagacctcctttcaagcaactagcagttgtctcgatttcaagagacgacccaacctcgactccaatcgccacctgcgcatctctcacccgcagtcacttgcttattcggggtactcgcaatcgctctttggttcataacaactgatataacacgcgcggcgctgctacacccttgcacacatccttgagacgagatcgagtctgaacagcgataaaggaccgatttttgtaccgtcgctttcgtcgtcagacccatcaactacacttcaatcgacacaatgccgagccaagctctgcaaggattgctggcggacctcaccagggactttcacggcgaacaacacggccaatctgtggatgtcctgcaatactgcgcggattggttccagaccaagttaagaaccgaggcaagcgtctgctcttggtgaaaccccagactagcctgagatagctgacgagctgaatactgggcgttgggtatcttttctatctttgcatacaacgcactcacagcgtgccatcgctcagccagcagccttgagcaaagttggtcccacctcggctattggctcctctcgcaaattccccaactttccgaccatgagccttccacaagcaccttcaaatgtgttccaagcccatctctctcaaccgtcgcctttctcggaacatgcgccgatggactcccccttcagtggaggtggtcttctttcgcaacgaagagcgacactggcgaacaccggtgccgcagcgtttcaggcgggcttgaatgcctcttccatcggacaacatgctccgatcccaagtaactataccatgggtctccctccctcatcgaaccagcatttaccccagcttgcggaggagacttccgttgacgaggaaggctccagtggtcccggtctcggtagcacagacgtacctagctcctttgccagcttcagcttcagtgagggtgcagcttcacccgctcgtgaagattcttcgcccttccagaacgccaaatttcctccccaagccagttcgtcggggaccgctcaggcttcagccgatgagctcaggccaccctcgtacgccctaggccgtcgaacttctgtttctgcagagtctctcgtaccgaatgaccctgctttcgccggtaacctccctggccaaacggacgaatctcagacccgggatgggcaagagacttcatctctaccgataaaatcggacacgcagctgcaaaggatcagacatgctatcgggcaaaacttcctgttccgcaacctcgatgaagagcaggagcgagatatactggcagccatgcgcgaggttcaggtcaagcctgatgaagtggtcattgagcaaggggccgctggagactacttttacgtcatcgaatcgggggagttcgatatcttcaagcgcgaactccgggcttccaatgagagcggagtagatggtgacagtggtcgtgggaagaaggttcacaccgcgggtcccggtggttcattcggtgaactcgccttaatgtataagtaagttgcgggctcgcttggtattagcgggttcattgcgacaggatcaagctaagcaggtctctcgatgacagcgcaccacgtgcggctagcgtcgtggcgaagggcgaagcgacgctgtgggcacttgatcgaatttctttcaggacaattctactagacgtaagtgtccctccgtctacttcccgaacacaaccttgatctttaatggcttttgccatcatgctcataccgcgcatccccataaacttccaacaaattaacagcacacctctcggaagagacgtatgtatgagacctttttgacaagcgtgccgatcctggcatcgctggagggatacgaaagggcaaagatcgccgacgccctggagactcgcacgtttcagtctggagagcgggtcatccgcgagggcgaatcaggtgatgagttctacatcatagagagcggtaccgctctcgttgaaaaatcagatgcaggtgttatcggagaactgaaacgcggggactacttcggaggcgagttgggttctgttcgggcggttgcgaacctcgcgctgatgagatccttttcttgcagaacttgcgctcttgaaccgggcgcctcgagcagcgacggtcaaggctggggggaaggacggagagaagttgcgggtcgccgctctcggtgaaaaagctttcaccagactgttgggacctgtcagggaaatcatggccagaaaggctggtgagatgtacggcttgacgggtgcttatcgttcgtagcagtctctcgtcaacaaaattgtcggtgcgaaatgagcttgtacaccaattagaccaaccagcgatcgttatgaaatcgttcaatacacaacaaggtcaggtgccagatgcgtacgaaatggaaatcgaggtcaagctacatgcagttctggttccttcgaacccgatcgatctagcgcgaatcaatgacatcagatacggccgtgacgatgtgcaggtggacctttggctggagaatcgtaggcgtgagatgcgggttgacctcctgttccatgtcgtgcaggacctgacgttggtagataaggcctattgttcgaaggattatggttatatgccgccggatttactggcgagtaaggctgctgataccgcggatctgcgattcccgtatttgaggcttgccgaggaggatgtgttcggggtggttccgtagacctggatctacctgggtcgtagacttgctgggcttgcccatgagtcctaggacgggccgcttgagccgaaggtaaaatcggattggaatgcgacccgttgggaagcggtcgcggagtggcttgtgcattggatcctgaagggcgggatggacccggccgtactatcgcggcagggatcgccggcgacgatgccggtcctgatacacccgctttgcgctccgccgccttcaaaatctcgtcgctagatagccgatttgcttgatgttaggttgatgaggatcgctagggcgtgaaacaaacttactcgaggaggtttaaacaagcacaagcaattacccattcgacgcaatcctcgttgccctcgccaagagtctgccataccttcttctcatcttcggtccggcccgtcacagtaatacgagttccgcctcctttttcagggggattcttggaaatcttgccaaactacgatccgggtcggctctcgtcagtttcagctgtggcatacagtttccgtcgaaagttttacgtctcccaactcacctcgaccctacgcggtggaatctgatgaccggcataagcaaagtagaacatcgtccaaaactcggcatttggattcggtttggagatttgatatagaggcgtctcatcagagttaacaatcttgtagatcgggctgcgaacccctgcattctcgattgtccagcgtaattctcgtgaggcctcgcatctgacgacgttggacctattcgacgtcgatttggatgcgtgtgaactggcagaggtacctggcgatgtaccatgccgcacaggcggaaatagtttcgccacacatagatcaccctcgggtgatggcgtcaagagatagtttaccgaattctgtgacatggcgagcggggtcagtgcctctgcacgcttgtacaaagcgagtgctgtcactaacgtgatcagtatgcctgcacgagaaaaacgccttgaagaatgctcagttggtttgtccgccagtggatatccatctgagtgcttacaggtacgaatagagaatgttgtgaggttgacctgtacgaaggatagcaaaggcggcgcgattgacgggtcagcatctgtcaagcagaatcgctgtgagggtctatgccatgcgatttaccatgaggtgtaatgatcagagtggggagatgattcggtatgggtgcatgatggggtgaagtgaagctatcaacaaggtgcatatgaaaaggtatcaagagcaaaataatcagattgctcgagacacggttgtggcccacaaacacttacaccgaatagatagctatggtagagagcgggcgacaaagaatcttgacgctcagtattcagaacgcttaagcagccgagtatcgatcttacctgccatggtggtagaaccgcctgtggacagttcttctagtgatgtagatatatcacccgctggacgcaagccagctgaagcgcttcgcgacttacgatctcgcctatttggatatcactccaggaatgttcttaagattgatccgataccaagtcctatgattgtcgtctggcttgaagttcaagagcgtagttcgcgattccaaggaggctgggcgaaagcaggtgataagtacctacggctcctcagatttactgatggcagtcgagcgcgtgaccggtcgttgcaggataatatgatcgattgccagtcctgtcggtgacttattgatggctagatatcgaggctagggtctcgatgtcaaatctgtcctatcggaagggggagagcaggtgaggatgaaggtttacaccagtgttaattcatcgatcgaggtcgacgtcgacgtcgactctccttttgtgtgtaccgtaggggtgtgtcctttgtggtgggtgggtttgttgacaaaatcgggatctgtctctagatccgtctgaccccgccgggccctacctcgttcgcctttcacgtaagaggaatgacgagaatgctagtggtcaatgatgaaatcacgtgattcgccctttgaacggagccaccactcgatggaacgacaaacgaatgctcgatgatgatcgacggagggctaccgagctaccggactatatcgtaccatcgacatccatcttcttttccatccgccatcgcctcctcttaactggaccccacagctaaacgctagaccaccaggatagaaccgctcgcatccaaatctcaattcaaacttgaagctggctaggacttgcctggtgacattttatctccttgcatcgtcaacgcggacacgcctcgctccatacatcgagacttatgtccggtacatccattcgtcacgcctcggtgtctcggaacagcattctcttgagcgaggtcatcgaattgttgagatgcaggcttgccgtctccgttccggctcgaaatcagaggcagggtacggcgacagacccgctacctcgccatcgtctgaggggaaatacttcttgtcaatgccagtactgccggtctacttgctcatcatcggtaaggatggcttcgcatgtccatgaatcgaactgagtcttactgaccagcttgttgcaatgtaacagtcaagaacgccgtattccttgaccctggccgaggcttcttcctcactgagcaggagggctcgaccaagatccgctttaaatcgcccctcgaacgtcattcaggaggctgcgcccatcaggcgctacgcatcccttgcttatgctatcgcttctacagaagacgaatgggactccacgccagtccatcccactcggagtcagtcggaaagcagtttggacgcaaagaaggaccggacgccttggacgacacctttggcctcgagctcggagaacggtcaagtcctgttctcggacgaaatctacggagagggtggtctcgtcgaacaagccagctggttctcagataggttatcccttccgagcgctatcgttcctagcacctcgacgtgggattacagcctcaaaaataaacgcagggcgagctcggccctcacatcgcgccgaacgataatctctggtagtgatcaagcacttggcatcaccaagccaaagctatgcgagcggacggctcaacgatctcgcacgcaagctcacatccctcatcgagctcgatcatccttatcgaggatgctcgcaggacctgtcgaaacaggatctgcaatgcagacgcatttagaggcattgcgtctacttaactgctccgggtctgtgagcgaacacggacgagtaacggtcggaacgcatgctttcagggatctttatcgagctgtggaagcagcaaatctgcaaaaatggcagcaattagccgagcacctcgcgtccgccctcaaacgatggaagcagacttcgaaagacttcttcactctcgattggcggatttgctacgcgctagtacaagtaaagatcggcagagtggataaggctatcaacctggcatccgaaatgatccgtgaacagctctctgacgctgaccgcgccgagctgttgccattcttggcaacattggcacagcactgtgtcagagacgacaagagcagctacctcatcaaaatgatagctgccaacttggagatctttctgccgtgtttccctgctagaacgagggattccatccagatgttgccggaacatcgctcattgagagatgcgctagccgtcgcattccgcgaaatcaaagacgtagacgcctgggttgctagacaacatgcagaccatatcgacgatatcggtgccagcatcttagtcaatcgcaggatgtcaagaatcgcaatagctgcaatcacaactcttgtctcggtctcgtccactgggcttgccgtcgtctaccataatgcattcgcccgctgcggtatcgaaacatccgtcgaggcaagttctcttctttggaaggctttgattgagaagggctcggtcggtcaagcatgggacgtattctgcacgacaaaggtcacagaaatgctggaagttccgggagcacggttgtctcgtgaagttcttagccggaccttagatctcgcccatcatcgcggagatcttccgctagcccaaatcactttcgacttactcacgacaggaaacgacaaaccatcgaagagagaactagacatctttcttcgaatccaagcaaacgcgggcaagctggcaaatgtcaatactattttgcaatgctattttggagactccttgaggcggctagatcaggatgtgacgatatcgccacgaccagaactggatcgggcgcctctgccagaagatatcagcataaatcagatcctagtccgggctcatgccgtagcggggactgttccagaagcggagttgtggtgggatcgtttacgggcgcgatgcgattcgcctcgctgcgaggactataatgccatggttcacctttactcacgtcgaggtgatctgttgaaatgtcagagtctgctcgaagatatggcccgccttaaggttgcgcctaatataatgacctacacgactatgctaggggcgtatgcttcaagcaaggactatcgcgctgcatctgcaatgctcaaccgcatgcgatcggaaaatcttactttggatcatatcgccataggcagcatcctcaacgtcgctatcgaggccggaaagtggacgaaagtcaaggaaatttacgacacgctcgattatggtgcacgatccgatccagcaatcgcgggaactatgttgaaggcaatgctgctgctcggagcaccttttgataccgtgaagcagctctttcaggagacattccctgacgctaaatctgcatccagccgagcttggtctattctaattcagtcggcatgtgacgctgggctgctgcaggaagcgcattctgcagtcgataccatgctcatgaacgcgaacaatcacaatggaccaaatccttacgcatttactatactcgtcgccgcccatcttcgcaagggagacctggccagcactcggcgaatctttgctcgaatggacgaactcggagtcccgatgacttcagtggcatactcccttatgctcaaaatgctgctaaaggacgcaaccatcgacaaagattcggtgcatcgtttcgctgtggaacttctcacttcgcgaccctggcaacatgtcaataatcatgggcgtggaagggatagtgagaacatccttaccccggtcatccttgaagcggcgcgcacgggcaacacggatagagtcgaggactatacgcggaagctcgcgcatcgaggtgaactgccacctctcacaatgtcgaccgtactcatggatgcataccgcaaagcgggtcaagtcgagaagatgcggagggtctgggagcatatacacagactcgctcgccaaacgcgtcaatcagacgagccctgcggcgccagcaatctactgtgtattcccctctcgatctacattgacggcttgagtaccgcttgccttcatcaagaggtattcgatgtctggcagtctctcgcagcagacggtttcggctttgatgcccagaattggaatcacttagccgttgcttatgtgcgatcgggccagcctgaacaggccttcgagatcgttgagaacgtcctgctagcgcgggcggatgaggtagccaatcgtcgctcgcccgccatgagagaaggactgaagacagcatgcaacccgaattcgatcgaaagttcagggtcaggggcgcctgcagtactcgcggggagtttcgaagaggaagcggctatgcggccgccaaaccgccgtcaccagaatcggtcgcgctcagatcaaggggattcgcggctgcccattagagatgctatcgccgacatcgtcagcaattggcgaccaagcgacttgacttggcgaccgacatttctgacagtcgcagtacttgaacgggcatacgctcaactggaaagcaatacgccggtgatggcgctctttgccagcgaagaggaggagaacgagatgcactcaactgcagtcgcggatgaaactgaaagatcaaccccgctggtcatgcttgcccggatgaaccaccgctacgctcggacaatttcgctaatcatgcttcatcgacgcaagcgacggactaggatgatcaaaaagagcaaaaaggccgctcaagatcaaagtaaatgaagaggaaagagagcacccgctaacacagaagatcacttcggttccagctagcccaaggcttctttagatggccttccactctgcagattctatgtatccaacaacacttcatggatgcccttggtatacatacataattacataaatgaaggccctcgaccatatctagtcgttgtctatttcggcctttaggtgtagatccctttagaggaatggctggtgactatgacggtacctaccgaaagtttcagattgccgaggtacgctttgcgcagcaaaccaatgcgtcaagtccggctgtggtagcagttgtgtgcgtctctgataaccggaacctatgcagagagagtcacgtagcaagacctggagacaaaaggccagaagtctaaatataccaattgctaaaaccaggaattgtaggcattgaatagctatggctagcaagcgaaggttcggtatacatctggtgaccaaaatgaggaattaggaaggcatcagttttcgatgtctgtcagtacagtacgccagatgcaaatcgttggctaaagtacagggtagttgtgaaatcggttcattccagattgcgccacttaacaaacaccatcacagacaaaccagacgtcagcggccgtaagcatcactggaaatactcagagtaatgctttttataccactactgcccgcgcaaggtcgtctacctcttgcggtcgtcactcctagctgctgctttgagtgagttgtgttgcaaataggcatgccatgattggctcatggatgcagaaagcaatctcaaccacaaagtaaacagaggaagcaaacaggaagcaaacaggaggcaaacccatggaacatgctagaagatctatttttgccactgaggcatgattgccaaagggtggcaaatctgaggcacttctgctattggctggaagacatgagggactattgccaccaatggcagaacccctcagatgtgaacagttcacactgacagctctgagtcagagctctgagtcattatttgccaccatttgtccccttccagaaaagtatatataggagaccatttgggtctcatttccttttcccctctcatgtactactttactttcatgcaaggcaacatctatcatctgcaagagacaatagacatagtgactacaaccactatcaaggagtggctacacaccgttggcagcagccaatattacaacaagttgtgtgtgattttgccagccatcttttcatgaaacaatatgatgctaaaaacagcaaggccgcaccccagacaatgctctttctgggggggaatatgcttgtaacaactatctagagctacgttcaatttctgataagtctaggtatgggtatttgcagtatcctggaagtgattgcatattcgtaccacccctaggcattgtacaaagtaccgatcagtacatcatacatctgcagcctgacgtctttttgttgtgatattggcggctgccaatggtgtgtagtgttacgggaagcgacgcggatccggttcctaagcggctggcttcggctcgcgcggtctcgtcaccctctctacgatcgacacaacgcatattcgatattaccatgagcgaagaacaatagcggcatcgacggatatcgaacaaagacctcatagtttgacaaccgactacaccgaacaaagacatctcgactccgcagatgattcatctttgttagatgaccgactcttgaccctcaattcgggtctctttgttccgaattcgcttcaccgttcttggaccgcctattgttctcgacccgctacgagtactctcagtttcgtacatatacttagtagaacttgaccgaatccggcagacgacgttcttgtactaggaaggtcaagttccaatatcgcattctatttacgcctactgatttgcaacagcaccacatcttcaagacgtattgtgacgaggttacaatccaggacactcgctaagtagtagacgtctcaccgttcgtactgaacaagctttcgatcctagctacctatagcgacattacttccttatccgtacatcaacccggatttgtatcatcccaaccgaattcgcttccattaaccgaactcagcttcactcctgttgtgactacctacaatccgtgccgacattgcactcagatattcattagacgcgacttagcgaagctccgccgtaacatgtagccactccttggtaatggttgtagtcactatgtctactgtctcttgcggatgatagatgttgccttgttgtgtaaggatgatcaatgttgcttgcataaaagtaaagtagtacatgagagggggaaaggtaacgagacccagatggtctcctgtatatactattctgatgagcatgtcctcctagtgtcctcccagtgtacttgcaactaggcttgttgcgaatttgcgactcagacgcataagtgcgactcagacgcataagtgcgactcagacgcataagtgcaactccagttgcataagcgtgactccagtcacagatgtgtgactccagtcacaacacgtgattctagtcacatgttgaccctttgtgcttgagattgcttcctgcatccatgagccaatcatggcatgcctatttgcaacatttttgtgttctgatctgacaactgaatttgcattgatatcgccttactttgagaccccttactatactaaaattaagattaggtatcatattagggtggaaggttccactggcaagaataagcaggagaggagcaaaggtgaaatccatcgtctctcaacaatgacagagccctagagcacatgccggctgcagtgcagggataaacagatgtacaaacttttgtatagactactccttggcaacctacagtgtttaacaaaccacacgaaatgctacctggagattgccgttgtgcttgacctccctggcgacacagctgtttgtagggcaaatttgactgtatcgcagatactgtggaagcaaaagctatgccatacccagaagtcacccccaaaactgagatatctgccagccttgaaacaagggagaagacttgcctatgatgagaaatgatggaaaatccaggagaactgaggctgtttgtttccaatctcttcggagcgttcatctttgatataggagattttgccaactctacgggcctatacaagagacgcaagaacaagaagaagcatctcctttcttctaaagccattgcagcctatcagcaatgcaccttagcaaatgctgactaagattgtaggagggtcatttgcactaataatcaatctcgattggatttggcatgtactcatattcaaggatgaatcctggaaggctgaggaagagctgcttcccctctaatgctgttgtattttatgacaccttctgtgaatgacttcacggaccatcagacagaaaatgccaaagttgtatcatatgaatggtggtgtgcaaagtcactagagaggtctctcaaccaagtactcagtattgtatgtgcagagactgataaagtagaccagtactgcatctgacatccaatcataattcacaactccgacttgcaagtcctgcatgaagtgcagtggaatcatgcaagctggtctgaccataaaacttttagcctcccttgttgacgccgtttcctcctaccgtcttccttttaaccttcctcttgagatctcagtccaattgcaattgggtggcacctcctcaaaatgaattctagtatataacagcagagatctgtcagtttcaacaataatcgtcacaaaaacaggcgtctgagcgggatatatagctcaggcaagtctcaggctgactggcggtctgaactctgtgattgatgtagtcaaacaagctagagaagatcctgcaacatcgtaatctctcaaatacacagctatgcacctttatttcttgggttttggatttgttcaaaacaggacttgtcaatgctatatggggtaggtccgtattgatgtgagatgtttgctgtccctcatttacctctgacccacgggttcttttcatccacggtagatgatgccactggctaggccttgcccatcagtcgcctcaatagagcatgtgattatattcgccaattccaaccaccgaggagtgggccatgcggaaccctgcttgttgtctatcattgtatcgtagcatacagatactctaggtgtctatcatcgcttttttataatgtattctacttttctatttgttttgtttgatccctgatgaaaccctcagccggtgtgtaccacccaaacatagaggtctccaaaagatgaaatcctgcagattgtcagggttagattaaggttgaattttgcactccgtatgggacttgcatcttggaactcctacctaaatttctgtaattctgtgttagggtggaaggtcccatcagaaggttccactggagaagttagcggaagaggggcaaaggtcgagattatcatatataagcaataatggatgcctagggcatccataacattatggtgcagtagggcatcaacaaacagactacaacttggggcatccgcttggacattgttgcaaatacaatggacgtatcaccattcaccatgttgaaacacaagatcaggcagcagacatgcttaccaagccattgaaggacatcaaacacaagcacaactgtcaactcatccatctagagtgatggagtgagcagggatcaccccccccccccctcccccgtatgctgttagtatctggccgtgctaaacgtcgagcttcatctcgcagaatacttttgcgggcactgctcggtcgggcataaccattctcacgatctatgggcgttctggatcatcccaaaggtcagtagtcagtctagtgcttccctggctgtctcacttattatttctcgtctcggtctcgcgccgtccatcgactcgctctccaccgaaataggggcaagtttggctcgatatcccgctcggaattgcttgtccgctcgttactaaccaatgcttcctacaccgtatacgcttcgcaggctgtggttgttggcctcgctcttggtcatgtacaagctcagctcccagatctcttacgctctgcgcagccacgccgccgatctcgccgaagaagaggatcgcgtccttgccagtctcggtcccgagcaggttgataacgacgacaaccagctagaggatcccgtgcagtcccagcaggacgagcgggctgagcaggtcggtatcctcgagcaagccgattcggtcaccccggtcaagaaaggccgaggtcgacctagaaagtcggtcgtggaaacacctgcgaagaccacagaagtaaaggaagacaaggttgtcgtcgagatcgaggtcccggtgttcaatgtcgaaccaccgaccgtgcgtcgaccggatcctagccagacgacaccggtacggcgaacgaggacgtcactcgtccctcccgccgcggtcgcttccccggccgccaacacccgatcacggaacaggacgacgactcccgtctttctcgatgacaatggtgtcgagcagacctacgtagcggattcgggaagtgaagagatgatcaccgtcacacccgcaaagaaaatgacgagggcgatcagaaagacgaggagctcgagcaagttggccgaataatgcgggacagctagaacagggctacgtggcagggccaagatgaaaatgcgagtttgaggaggtttcgatttctttctattcatttgttggatacaggtcctttggtatcttgtgaaaggtaacatttgttttataatgcgttgaatgcgatttatgggatggtcagatgggctagtcaggtgtttatgctcacgccgcttagtcggccgtgcctggatataggtttgacaaccgagccttgaaaccggacgtatattcagggttgggcggcttatcgtcctcttgagcggtaacgtccgttctgtcacttcagctctgcgggcatttcttccccttgaaccccagccagaacgttccttgcgcctgtcacatcgcagtgattcagctactagcacggtcatgacccgacctacggaaaccgacttacagagcatagccattccttccctagcatcccacgttgcactacctatgtgcggcaaaacaacgcagcggggctgcctggctaacggatgatccgctttgatattgggctcgccgtccaccacgtcgactccggcggcgaacaattgaccgtgatcaagcgcttctgccagagcgtgcgaatcgaccacggcaccctgcgaacgcgggagtcgcgcagcaagatcagcaccacgccttatcttcgggggagacggactggccatgtactgacccttgccgagttgaccaggaccgccgtctccttcatcttcttcagaaagtctttcccaacgatccccttggtcgactcgttcagattgcagaggacgaccaggacgtcgctcttggccgccaattcgtccttgtccacccattcgacgagcaccccgaagcgtttcgaatactcagcatctatcgcttgttggtccgggcgacgtcgggacgaggtgtagatgactctcggtccctctgaatgagacgcggggagggtaaacgagaggaaccgggagaggaccgaatgtgagattcgtccgaagcctaaaaagccgagaacgagattgggtcgcgaaaacgacggtccagtgaggaggaaaggtgaccattgggtttgaggccactgttttttctcagtggcttagtcgaggatgggcaacgcggcaaggaagttgtggctaggactgacctggccttggtggatgatatccatcccctcctttgcccgtcgcatggccatcaaggctaacatgacggtgagatcggcgactgcgaatgagagggtatcgagattagtcttgaatactactgttagacacatgatcgtgtggacctgccaacataccggcatcgttgaggacatcaggggtatatcctagtcgaacctgacgcgcttgcagagcttggacgtcgatgtgatctgtcgaccggagccgcgaatatggtcagctacgaaaccgtatgcattgtatacggagcagtggtagcataccatggccgacgctgaatgtagatatcaccttgagagaagggcccgctgcaaagggggaggaatggtgtatcagagtgacttcggtattctttagccatgtcgatactgtagcggacttaccagcagccaatagctcttcattcgcctaggaatacaggtggtcagcaggatctttgcaaaacggattggcatctggtcagcctcaccttgtctgccatcatgacacatattccttcagctcctttggcgttctctagtacccaatccctagaaggagggtcaggtgatcccgggaaaacgacaatctatgggggtcaattcgccatcatcagtcatgtcgaaggaggagaagtggagcagtccgaggcagtgactgacctcatgattcgacgctttcagaagacccatggccttttcgcccaagtcccggcagacgacgatcttcgctcgcgacattgcgacagaggttgcgaaagttctcgtattggttgatccacttgccagtctcctgaacatgcgattagtgagtcgcagaagtgcgagcaattatcatgatatctccaagtcatccaagtcatagtcgagttcaacatctacacttgcttcggactccacggcgcgttaccgggccgaacattaggccggcgttgagccgcacaaagaattcacgtgacgaaacggcgagctcaaagcattcgaaaggtcacaaggatgttaccaggggtctatgcctagatttctacaatcttgctgtgtttggtagtatcaggaattgacccatctccaacccgtctcacgggcgcaacatcatcgatcaacagcgcttcctccttctcgttcgcttcctccttcctgccgtcctctacttgcaactgctctattcgcgacatcacgatgcgttccaggtccagccatccgttccgcccgatttggccggcaagaacgtagtaaaatcccagctttttcaagacttgcttatctttgctgcttccgtgcgagctagaggagaacagagcgtagagatctgagatgaccagtctggaggcgtggggttccgctagatccagtggaggtcgaatgagatctgacagatcttgcacaaagtcgagtgactgggagaccgatgacgaccatttcattagctatgctgaccagcgtcgactgtaaaacccgtgtgtctatctcacctcgcggtctagatcgaccccgccatagactgcatcctcggcatccctcatccccgtagctttccatgttgaccgaggatcaaacagaaatccggccaagcctctaagaagagttttgatacgatcgatctttctccgcttgcgatctcctgcctcggattgcagcaggtattggaaagtacgagtcctagggagaaaggtcttgacggtgacaacgtaggcgagactgccggcatatataaaaaattgcataagcaatttggtcgataccgcggtattccgctgtttgtgatgtgatatagggctcaccagatggtcatcaagttgaaccgcaaactctcgacgacgctttgaggtacggcgatcttccccaaatccgcttcgtctagcaattgtggcctctcaacgttggtcacactctctgcgatccgatcgtcgtctgtttcgtggtcttgcggctcctcctcgagccgtagggttactccagtaggtgcccaccaacttgaagcttccccttggattctgccgccatcctcatcctcgtcctcgtcctcatcgtcttcaacatcttgcaccagacgggcgcgagatgcttcagattgcaagagcccgacaaacttttttcggtgagaggcgggaaggagagcaaagaggtcttgcggggcgagcgagtctgcaagaggtgggaaatgcacgactcgggtccttgagcggggtgctttggatccatggctctgatgtgtgatcgaacttacctagatcgacgccttctagtcgctgagcgagctcttctctcgcttcgtcgtcttcctcgtcatcattctcatcttcggcatcgcctccttccccgatcaatcctcggtacaggtcctccagcttgcctgcgccgattccatttccagcggtgcctgagacttctccatctgtatcaccgagttgttgttccacatcgtctccgccccgctcgaaccgttcgagaatcttgaacattcctcgtttctcctcttccgagctcgacggattctgggctattgactctcggatggaagcagcgtagaacagctcagagcactgaacatgttgctgttgaggtgaggtgaaaggataaacccggtcaattacggtcaaggtgggcagaagtaaggttgacactcacggttgaccggaaacagtctaatgagcagtaaaagatgttacatctcgggcagacgtatttgcttttgttctgccggcatctgaggaagataggggtgccatatcagcttagatccagactagctgacaccacttcattggggatatgaggcttactaacatgccgcaatccgtctgttctacctggtttagatgggtaggcttgagagccgttgagaatggcagtctgatgggtttgcggcgattgagttgcaggctggacattgcgatgagattggcaagttccctggagcttcttagacgggcggcgacgtcactggagctggtgcggccaggtacaatcttgaagtacagcaagatggtcgagcggtacgatcggtcgtcgacatcaaactgctccctcaacttgcaatggccgtttcaagacggggcccattccgagtttctggttgttttgacacgtcatgacaaaccgattgtcagtacgcctttaaatgatagttctcctgcatctgatgacgtatctttctgatcatcgattcgattcacttcgtaaacaacgcaaaggcaatcgaggagacgacttgcgatctaaaagcttgggcaatcaaagccgatttgcgacttgcatccttgctatagactcgctagactcgcaatttacagtttccttagtcatttgtctttgcaaccactcttacaattgatattctaatcgagatgtccgactacccaccttcaaacccgtcgattcatgacatcaccaacgtggacatcaacgtcgcacccgacgttcaactcgactcgctccaaaaacagcaggtcggactcgtcctcgacctcttccaagccaaaggaactatggccaaattgaacgactggttgacggacgatgcggtatacgaggacttgttcgctactaccaaggggagggaagaggtcggtgggtgtccaggcgagatcggggtcgaagtcaaggctcatacaaggttactgactgaacttgccgttctattctcccgtcccagctggtcaatttttaggactacctgtcgtctgtcaatcgacatcaactttgtctcaccaagtatctcgcatccactcccgccccatcgagacctcctcgtcttccacctacccaatccccacttcgacataccccaagatgtaccagatcgacatggacatcgaacatcgtttcgttttcaaaccgctaggtaacaaggtggatatgaagagcacaatcttgatcttcgccaatccgaaggaagagggtggaaggattgtcagaatccaggataggccagtagatcagatccccgagaacagctttatcaacgtgagtgatgcgaaccgtccctgtcattcaatcatatccctgattcttacatatcggctggtacctggtcgatcgcctctgattcaggccctgaggaagatgaacgccaaagtcactcctcacatcctgggaatcccgcagaccgagcaggaagatcaagccaaagccgaaaaattcggcgccatctagtgtctctattacatcaggtatattctccaccgacctgtctgtaggcagtggcttaatcaaacttgtagtgccgtcgtgacctcgtaacaccatcggcatggtagaacggccgttctcagtctaatcgattccaaccggaagtatatcccaaagcaaggccggaagcatttgtacatatccaacccacctcgttgcatcgtctagttagctggtaaacaggtttcgatcttcggcttcaggatcgaccagaatcaatcatcaagcttgtatttgttcaccacgacctccaaatgtacttctagttcggctcaagcatgtcctcggacggacgctatacacggccgagtgcggaagagggcttcactctgatctcggccctcccggatcgcgatcaatcagggtcgaattcggatcaccctcaagatgatagacgagagcgcagaccgtcctcagtactaccgatcgccaggattcgacgacctatactgttgatcttcgtcgctcttctcgatcttgtgaccaaccacgccttcttcttgattctcgatcgatccagcacatcccctgcaagtccatcagaatcgtcagcttcacgtcacacgagcatcgtccgcctgctcttcctcggctacacccggtcgacctttatcctggtcttagcccttcgacgggactggccagctagaggaaggctatacatgactatcgctttcgtgatcacgggacttgcggtcttgtgggagatcaacctgagcgtactttatcgtggatggggggaaggccaaggcaaggatatggtcgcgttcgcaatatcaaagggaaagggaaaagcgatctacttgttcctggtcagtatttgcaagaccgtgaagcaaattaccaggctgagtcggaatctcgttttcggtttagcaaatgacgttcacatcgctcgaatacgtgagtcttgtttctgaacctaatcaggtgcacctatcatatccttcgaattccactcaacaaaacaattcgatcgttctcgtccgcactccagatctcctacgctctctctctacattgggctactcgccagggtcgatacctcccttccgttctagcccgatcgaggcagcgagccacatcgatcaggttcgaagaagaggacgtcttcctagatcgacctgcggagagggccgccgttaccgaggacgggtacttggcaccccgcaccttcgcacgcgacacggatcaagctacaggcgaagaagaagaatacctctccgactcttctcggggatctcatggggacgacggcgaagaagatgcggacgagctagacctttcttccttggcgggttcagatagtgacgatacggatgaggacgagatcatcgacttacctctgcccatagaagccagaatcgaacgaaagacctcacaaatgtctctacgtagacgcatgcgggtggacgagacccaggagctcttggcgggttcctcgcaggctcgagcgggacaggtgcaagtggaagagaatgacgagggtagaggcggggtatgggagagtgtgagaggcatcttgggaatcacaaacggacgagagggacagaggaaacgcttgagagaagggtatggaacgatctaaattgagtcgtgtcgtctagctgagcagttgtatatctgatcaataccccagtgatgatgatggtaaagctcgaacaatcgccattgcggtactcgcacggacgatacggttgattcgtgatgtagtcaagaagttgaacttgcgaagatgatgattaaagggagacacctatttccttgattcataaggtcccaagcaggcattacaatggtagtgcaaggttgattaccaggtttcaccgacaagaagtcaccaagatgaagtattgcccgagtccacgggcgacatctatcgatgggcttggactaaggaagaattgctgttgaccaaagaacgaccggacattgtggatatcttgcgacatgtagcatcgtcttgtgctatcttctcgggcatgcggcactggtgtgaagcattatagtattatgaagggtacactggccggctggcataattgattcagatcagccgtgggccgatggctgtgggtatggattagtttgttcgcctacttgaacattgcctcgctcccgtccctctcgccgtggtcgccatcctcgtcgtcatcttccagatccaaaccgattatgcccaaaagtcttccaacctctttcccagcccgtacccttcgctcatcctcgttctccaccataccaagctcctccctcgtcctgttcaactgatcaaggatggcctcgaggttgacttcttgatcgagatccaggtcagggtctagctgcaggccgtctccggatgcgcttgatcggaaggggccaaaatcgtcctcaaatccgttgacatcactgacgaccggcgctgtgaacggtcgggagactgtatccgtcgcgtcattcaaccatgcttcgagatctccttccatcgctgcggtatcggctcgatcccggtccataacctgttgccgacgcacatcgtcccccttttccgagccagaattcggagcttcttgctcagtccgatttggcgtcttccgctcttcagcttccatctgccgattactcgtacctgcgggaagccgcggtttcctcttcatcccttcccacatgaccgtttgcaaagactcgaagatgacctccaatccagcaccatccgcgtcaccttctccctcgtcctctttgcttcgcccaagaccaatcgaagagacagttcgtgactccggagcatggacgacgacctcccagtcttgatcatcgaatatctctgaattcctcacctgtccagcagtctcaggccgaagggcaaggcacaacgcataattgagctcgcgtgacttttgatgctcccggatcaggtcgagatgctccggacgaggcttcggctgattccaggatgaccggtatcatcgttcgtcatggacaggaagaccacacaatggtttggaagatccagcgtcagcttccgatgctcgatcgaagttggacgagatatgaggagaacgtaccagatcatacaggacctcggatccaagcgactcgtcagaaaagacccagataaacgcttgagctccatctgccgggtcacataacgctcgaaattccgaaagggtgtcgctactcgggccggacgtagtggttgcatgagtgtcttcgttcgagccttctattgtggaggagctcgaattgtcaaaagaaggacccgcggatggggacgatgggtttggccgagaatgcccatctaagcagaagatgtgaagtgagatttcggcggtgtagtatttgttgtcgattgtgtaacgcaagacttcttgctctgggtgtggtactttctgctcctccttcgtccgagatgtagccgaaaccccacgctcgcttgttgacggttcctgatgtgatgaaactgacctggatgcagacgagctaggatgaacgtcgttgcggtctaagatcgagcgccaaacgagtcagcctgcggcccgctttgaaacaggtttccatcacgcactcaacaatgcctgaaggagcaacgggtatgtagaagcgtcagtgaggaggatgaccgagtttgaggagatcatcttgtatgccgatttcagtacaggtgtaacttgacacgtccgagaaccaggatatcacagagcgagtgtcgtagattagatagcaggacgaggccgttcacagagtaagaacctcagatgtcaaggatatgcttccgatcatagggtcgttcggaagtaaatatactaaaattcgaaaagtcacactgagccggaccgaccggatcgacggcgatggacgaaagtcaagttgggctgaagtcgaggctatcgggaattatgacaccagatcctctaacggtcctacgactggcaaataaagactttcgtgccgggaaaaaatgcagaattgtagccgatgccgcgcccttctttcgatatcattcgacacatcatcgaaagtcgattcggagcgagtcgttatgctcatcgggatgggcctgcccctactcactcactagccagaaacacacttgaggagggtctcattgtggtctactctggccaccgtgccctgcgccgcaagagcacaatgtgtttgcatggcaaggtcacctcacatacccttcttgtgcttacgtaaacaatttccccggccggcgaacagacgcgacgtcgttggtcgagtcgggtggtggtgatgggcatattcaacgtcgggacccgcatcaacatcaacatcaacatcaccatcaccatgacttacaaacacttcgtatcgccatctctgactatctcatcgactatatcttcctcctcgagcttattagactcggactactatcgctaaaccaactacactcgtttcaatcgacgcgtctacacgacactgtaccttcacagcatcgcctaaacgcggctttcgacttctctctcttcccgccatacatcatccactttttgatcagacgacaactatcgactttacaccgtagcggtcattcgcctagcatcttgactctacattgagatcatcgaaaataaatacgccgagttctaatccgcgaaagtattcaaaggcatcggctttcatccaatctttcatcgtcaatagactgcctttttgatcgacccgatcgcggataaaagatctaccaatgacttgatatcggttcgggctttgcatcaagcagcatcttcattatcaccgctctccgcttcaagcatcttgcattgacgtccgatccctgtctctgagctggtctcgagcactatcgtctagcaaccctgcagagtacaaacaacacattcaacaacaacaataacaagaaccgtattagccgaaatgatggaccaggaagaaacgcacccggacttggaattcacctttcccgcctcttccccaaccccaggtgctggcgataggttcggcaaaccggttcccatgctagacttcgggcgtgaagcccggatggcgcgagaggagacgatcggacacggcgtgggcgcgggggatgatctcgtcgagagccatgtgatggcggtctatgagcgaaaacggctggcgcaactgttggctgccaagaaaaaggtacgctgggttgcggatcagtaaggtggactggctagatccgcgatactgatggatcggtatgtctactcgacgaacagctgcgctcattcagggaacgcaaggcgaagaagcagcatcctagcccgatgctcggagaatcgcctgatgtgggacatgaagggacctttgccgggctggccactgaatcaagagatgagccggtcggctgggatgacgacgctagcggtgtcggtgctccaccctttctgtctccctcgccgaatcccgtcgtaaccacctcgaacgtgcattcacggactcgctcgaaacaccttactccgatggatatggcgctgttcaccttgccgacctcggtcccgacccaagagccaatgtcctttctcgccggcccgagtacgagcgagaccatgttggcaggaaggaggaaaagggaggctctgaagccgatcagggtacaggagagaggacgaacggggaccgggttcggctcgggatctgggatcgggttgggcctaggtatggggttcggctttgggttcggcgcgggtgacgtccagcccgaacctgtctcagtctttattccacctcgggagaaagaaaccggtatgtctcccctgcgaggcagcccacggtcgatcgagaacaagaaacggaggtcattcaagaagaccgctccgatgcatcgacattcggggtcagcggacagccttcgaaaattgggtagcggttttgggtggaaccctcccgcaagaccgggagatgaggaggagagggggatcaggacagctcccgccaggctagagggttcggtcacgatctcgaacgagggtcccgggttgacagggttggcagaacctttttcaatcccgcggcatggtttcacgtctggcaaagaggaccccgtcgatgtcgatgtcggactggagatgccgggactcgattttaccattccgatggatatcgatgcggacggggcaggcgaatcggaaccgttctcgttccctcaacgacgggcatttgctttccctcagaccgagatgacggacgagcggccggtatcagtcctacccgaactcgctgttgtcccctcgacgccagcgtgggaagagtttgccttgccggcgctcggttccgattccccggggcttgctttagggtcgagctcctcccctactccagaacacggagcgaagacgcgattcgaagggttcaagtttggacagcctgcaccagctatgcaggacaagccggtcaagccgaccatgcccgcattctcgtttggcaagcggctcgaacccgtcgtcgtcgtcaaaccggacacccacacggatgaagcgccagcctcggcggcatccatgcctagccttccttcgaccccgaccaagaagaagcgacactctcatacgagatccgggtcggtttcgtcctatcacgcctttttgccgcagcatactggtgtagcatcagccccaaaatccccgggtatgctatccatcgactcgatgccgcttctgggctcgagccccagtggtaggctaagccccggtccttccagccccgttgagggatttggtttcactagtcctgtgaaggctccgggcgatatcaagctcgatcgtgagggcgccttgaggacgctcgaaggggcgagaagtgggctcgcaagtggagcgagccccgcttcgaatcttacctggcctatggcgggagcggacgggctatttggaagagatggcaggcgtcttagtgcgggcggtcttggtgcacagggcaaacgaagaagccggaagagtctgatgatggaaaaggctcaacaagagccgcccgaagtgcagattcccgatttggacagtgacgaagaggttttggacgtgtcttcgccgaaacctcatggctcggcgccatcgtcgccgcgtccaacttccggcaacatttcggccccggcctcgacccgcgactcgtttgacaaaatgttcaaagcgcctcctgcgataagcgctcctggctttgggctcacactggcaccaacgatgggcgcgagtgtggagccgcatctaaacacgctagtggaagaggaggagccagaggacgaagaaccagaggcgacgacaccgaaggctacagtggcagtatcttcgccgccgctgccatcaatccatttaaggcctctgcgccttttgtccacgtcgtccgaatcggtgacatcgtcagtcaggccatccgatctggaggatacgtggtcggaaaggcactcattgagctttgagcgcggtcggtccgcttctatcgaatcgacacccttgtctcccagctcgacgtctgacgtctcggcgcaacgggcgagctcaatcgtagacgattcgatgcgggtgggacgtagaccgaggagctgggttgcccgaagcaagcgagcatccactgtcagcctgagcgggtctgtcaggacgcttaatgaggtgtccgatgtggccgatgcagaggaacctcagacattgtcgcaggccgtcgactccaaggtaggcctgccacagggctcccgagtccgaagacgccggagcacgacagcccacagcatcgcgttggggtcgttcgaaacctgcgaggacgttgccctactaagggagaagctggcggacgctgcaatggaacggatggcgatggagcaggacattcaggattggcgtggacgatgtggtgatctcgaaaagcagctgcgaacagaacgacagcagagtagcgtgttgagggatagagttcgacgacgtgagtccgggacgagggacagatccaggttcgcaactaaggctgatgactgttttttccggtgcaattcaagttggcgaccatctctctcagatttcgtcggcagcccacccgtccgagcctaccatactcgaagtcgatacgcccagccaaatgatggcttcgatgcgcgatcaattattcaagctcgcgcaagaagtagagcgcgaacgcaaagccaaggtcgatgcgctggccaacgccgccgggctccaggtccgtctggaagcgctcgctcccgccgcgcagcccgaacactcgttttcagcctcttccgcccggctgcgtgggtacgcatttccgcaaagtacggtcggggtcgaaccgctcgtataccgatcagagcgggaggtggaagagaatggtccaccgagcatacacgtctcgatcgaaccgcccgttcgcgagctggactttcgcacctgttgtgggcgttgtcgagggaatgtgattgaattgtgaatgaggggatatttgacgatttcttccgaatcagaatcttttggggtctcatattgtatccagattggtctctcgcgttgtaacgtataccatttcgattcgcggtctgtgctcattcggcgatgtcggcagagactgagattgatttcgatccgccaaggctagaagactcgctcgcacgctgtgcaaactcgagtcttgctcaaggctttgcttgagtcgtttgaagaatgtccaaatttgctcaaagcaatctttccgaggcgatgatgtctctgccaaatatcgatggtttcctcaacggtgacatctgttggagatggtggaaattggccgggacgagcggttgactgcaccgccgccgcaaaaactacagcccgaagacacccacaagactgtatgcccgatgagactcgagcagacgttgccaatggatgtgtagcagcttttccagccgggcaaggcaccaaccgttttcagaacggctcgaatactcaaaccatcaccaaggagactctcactacgctgatatatctagtcgccagcaaacccccagccgcttcagtacgagctttcactgtgttcgcagaaaacaaatcgtcccgttcagcctggtcatatctgtttgttatcaccagctactggggctggccacaacgatggcaggtcaacgtatggggaggctgtgaaatgtggtctctgtcagtttcatcttttcgccacactgacgatcattttgccttgttgatacgacgttttgcgcttggcttgaaatgtcgtcgtcaacagcagaagatcaggttcggcgagggtgaacattcctatgctgcacattgcacaggatcagatcacaggggttcttgcagaactcgaagtgcaatggacacagcatgaattaaagtcggagaaggcatctttacgactttttgcgacgaaacgcccaaaggttactagagtcacgaatgccttctccgactttttgcgacgaaacgcccaaaggttactagagtcacgacacgcgcgagggtgactactcgacttgttgtctataatcacttttcagagagtcgtattcgggttggccgatttcctctttgtcaagacattgacgtgttccatccccgtcaccagggggtggtgctgaagcagtcggcggtttggcaagtgtcccgtacacctgtaacagtgattcccatttgtttttatttgtttttatctttttttctgcctttattcgcctggtcgtgatcgactcgcgatcgtggggaccgggagcaaaagttgttcggaagcaaaaagcaggcaacaacctagacgacagttgaacgagttgatccatctatcaactttctatgtccatcattcgagttcaattgcttatcccgaccgactctatcagacaacctacacgaacccgccagacatcttcaacttcatctctgatcatggccatctaccaagctaccgcttcggcgcccgtcaacattgcttgcatcaagtaagtacaatgttgaattcagaacaatcaacaacaacgaagacctcgtcccactttgatactgatcaaccggccaccttgacgtcttacaggtactggggcaaacgtaacacctctctcatcctccctaccaactcttccctctcggtcacgctcgaccaggaccatctccgatccaccacatcgtctcgcgccgacgcttcgttcgaaaaggatcgattgtggttgaacggcaaggaggaagagatccagcaaggaggcaggttgtgggtctgtatcgacgcgttgaggaaatggaggaaagagatggaacagggtgattccgggttggacaaggtcggtcccgaggtagagcatagacagtcagcctgatactgactttgacctcgatcacgaacgctcgggtctgctagatctcagagtaccacgtccacatcgcctcgcacaacaactttcctaccgccgcgggtctcgcctcgtccgcttcgggcctcgcggccctcgtcgcctctctcgcgcaactctactctctcccccagactccctcgcaactctccctcgtcgcccgtcaaggatccggctcggcctgtcgttcgctctttggcgggtacgtcgcctggcgtatgggtaccgaagaagacggttccgactcgttggcggaagaggtcgctccccgttctcactggcccgagatgcacgccttgatctgcgtcgtcagtgatgctaaaaaagggacgagctcgacgagtggaatgcagaggacggtgcagacgagtcctttgttgcagcatcggatcaaagaggtcgtccccggcaggatggatgacatttccaaggcgatccaagcgagggatttcgaatcgtttgccaagatcacgatgagggattccaactcgttccacgccgtctgcctggacacggaacctcccatcttttacctcaacgacgtctcccgcagtatcatcggggtcgtcgaagagttgaaccgggccgcaggcaagaccatcgccgcctacacgttcgatgccggtcccaacgccgtcatttacacgttgcaagaaacgatgcccatcgtgttgaacctgatcaacaggttcttcccgcaagacgtcgcctttcccaacccgttcggcttggactgggaatcggccgaggtaccggaaggtttcaacaccaaggtcgtccccgagggtggatgggaaaagggagccgtcgggaggttgattcacacgagggtcggcgacgggcctcgaaagctggacggcggggagagcttgttgaaccagcatggtttgcctaagaccctcaactgagagcgatagatagcatgacgctacatcatgagagagtcttgttcattataaaaagattatgacatgacacacaaagggtcaactctggaaccaaatgtttttgtctagcggagtcaccacctgtctggctactggtcggttgattttttgctcttcttgccatccacttcctcttcatcactgtcccacttgaatacctcttccgactgctgcgcattcatttgcacggcgctcgtcctacgcttgcccttgtccggtcgaccagaccccgcgctcgatcccgtcgaattcaacgcctcgtcgatagagaggccatcgtccaatgatcctcgataactagggttaataggtaccgcaggcgctgtcgaggcccactgatctgtcgtcgacagcgagccgggtttggaagacgaggaagagaggggtagcgagtgatacgtgttggtgcgcagatgagcggcgtatgagtagacgaccacaatgaagtaaatctaccaaaggtacaccacgagcagtgcgattgttagcctcgttcttacaacacgctataaacgtgctcatcgtcaatcgtgaacccaccttgagcaaccaagcgagcactaaaacgaaagctgtaaagttcttttcctgctgccatagtccatgcgcgatctctgctgtgttcgacggtcgctcagccgggatctcgtgtcgagagatggccaggtctaccaggtccttctgggcttgcgaattgaaactcctcgctccatcgtgggggatctcgtaccactgatgtcgtgcgaatcggagagcgtaaatcgtctgcacgatgtggtcgaaggcgtacaggtgggcgagcttcaagcacttgttggtggattcctaagtgaattaagggaggacaagataattagcttggggtcctcctaaagtgaggactttaaagacccacatctgctacagctcgtagtccccaaaccacgacgtatagggtcacagaagaatagatgtaaaagctcagttgagagatgctccctcccgtaaaggcggatatcaagccatagacaccggcaaccttgttgagtgcgccaaagagcaggatgattttggcacctgcaggataagaggtagtccgataaattacaataagtgcgagtggaacgtgggatggacctgactggacttaccggactttatgtccaggatgccgaagaacgagttgacgagcgccggaggctggaagcctcggaaggttggcatgctagcaatacaacgcgaagatgtcaggaatgaaggctagtatattttggggaagacgctctctaggaacacgatgtagcaagtctttcacaagtggtgtagttgatcgatcgagacgataagatgcgaggctctgttcgaatgtttctttcgacgattagtcactttctcggttttgcacgcgaccggctcccggctgccaattctgacgagccgtccagagaaatcgatgtatataaatctccggggatccaaccacaatcatcaggatctaaaggctacaaggtgatccatcacgccaatcaaattctactacgccaaaaggctatacaagttacgtgtctcgccacaaaacaccaagtaagatgcgcgtaccaatcgtatcaaattcgtgaaaaccgagaaaatctcagaccccttcgttgtcccgtcatggagtgacgggtggaggtatactgctacccagaacttcgtcgctcagttgttctgtccaagctcctttaggttttgtttcgcccgccacccgtaatcgcgcctcccccatggcttcgatcattgaagcctgtttgatcggtttggtaagaactgcgatgcatgaacctaggtcagacaatactctgaacaactttagctccttctcagttgactcacttcgatctgctccggcatcgaggtactatggacattcgagcaagctccaaatgtcagtcaacgtgcgtcatacggacgtgatcgaccatgactcacctcggtttggtcgtcttgcagagcatttcctgtagccccgcaaatgaatatcgggcacccgaaagatctcaattcccgtgcgcattcgaccccggtcatgactggcatctgattatccaggaaaatcatgtcatattgcgtatccgtgacttcccggaaatgccgttgtcggaccatttcgagtgcgagttttccgttttcagcttgatccgtctgatgacccattttttgcagcattctagaaagcatcgggcgcggcatcagtatgcgaacgagcgccgaggacctggtttggaacgtcgcttaccggcacatcaacttccgcgtcatactaggaacggcaaattaccgatgtgagtatatcggccgtctcagcagtcgccattccactcacttgtcatcgtccaccacgaggcagtgcagaggcggtaaaccgtccttggtcttgtgtttcagtggtgttatggcaggcgtcatggcaccagccattgactgcgcgtccgatccttttctgaatgcgtacgaagcatcggattgcttcctaaagaccgtcgaagtgtccgactcttcatagctgggttcgtccgattgaatagcgggtgtaaagctggggtattgatggtgcatgacctcgatgtgaacttgctcttcgatcgcgtcaaacacgttctcggccttcatatgcttttggtaaggaagaagttcataaggaggcttgaagactgcaaagatgcaaaaacgtggtcagtatcgtttcagatccggagctaacaggcaatactaacgagtcgacgaattcgagtcaccagaaccttgactatcgggggtctcagctacttccccgggtgacatgggagtctgagcttgctggaaaggcgctcgaggaggttcaagttctgctgcgggctcggtcggctggttataggccttgtcagaaatatgaacgggtgggtggtccttgagtccccgagagacttcaagtaatggcaggatgttcgaaggacgagacgatggcgggggcagcaacaaggcgagttcaaacctgacgacggagatcgagtcagaattgttgacagaataacgttgccgctctgaccacattactgaccagaatgtggagccaacaccgagttgactgtcgacgcccatacgaccacccatcaacttgacaatctgcatgcacaaagccaaaccgagaccggttctaagatgttcgcatagcaagattagctggaagcgcaatacacgcaaatagtccggcttaccctttaccaccctggcgtcgaccgatttcggtttgctgcaagccagagtaattttaggaggacagatcgattcacccttccctggtctaatgggtttactcacaacgtagggagagaagagagccccgcgcttggtgtccttagggctcagaccgattcctgtgtccttgacttcgacccggatgattgccttgtcgttgctgcctcgaacgaaatccttttggtacggagcgaagggattcgactcatctccgttgagggtcttttcggaattaattgagtcatggttagacgccgtagggttctcgtctagcggggtaaattgggcgaggcggggccaaagcagcttcgtcgtgaccgtaattccgcctagaaacgagttagatgtattagcatgtcgctttcagttgatcgggataggtaagtcacctgaaggagtaaatttggccgcattgctaaccaagttgctgaccacttggctgtatgacgagggaagtcgattagcgtcagaaattccagatgcacaatccttgcaggcttaccggattcgcatttcgtcactgacaaaggtgccaccgagtttgtcgatttccggatccaactcagccttcaggtagagcccactagcttgcgcttgagcgttgtgagaaaggacaaccagctggaccgacttgtgcaactcgaaaggtttacgggattgtgtaaactggcgagatgactcgttgtcagcttttcccatcaaagcgaattgaaaatacacgataagtgcccaccttcccgctctccatacggttgaagctgagaaatcgaagaagaaggtcaacagggtcgtccagctggaagaaccagtgtcacccacctcaagacatcattaaggaccttctccatcatagtcctgaaggaaggcgaaggcgtcagagctgtcttgcacgattcctgcggtgaacccgctcacaatgatgcttgaagaccatcgaccatgtcgcgctggtccttgtcgaccgtgtcgtatacgccttcattctccaaattctgaacagccaataatgcggtattcaatggcactcggacctcgctgcggatcatcaaaagcttatcaatgtgctgaaggggttcgaagagagacccaaaccgggcgcactggaagatgtatgaaacaaatcgccgactgagcgcgttggccttcttttccgagatttgagcttgttgcgtggcactttgggcagaaagcgacacttcagtgatcaccatcgagatcgtccaattgagaaacataccggtactgcagcttgagctgggttctcagactgaacagctgcctgtccgatttttctttcagatagctgaccatgagcaagaagccatggaagagtaggactgttcatgacgtagacagcgtcagttatcgagcagtatggtccacggcgactaaagattattcacaattaacgaagtttcggtacctgtatgatgagcgggatgttagttaccgaacggtcaatgtaattatggtcttagcttacatgagagcaggggagcccccgactacgatgacaagtgcgtgtcagtgatgcatcgaaaagtcttccggctgaccgacgtaccgagaatcaaggcaatgaccagtacggcccatgtgagcatgccaaacatgtgccacgatcgctttccaccaagcgccagaatcgacaagacaggcagagctgggttgatgtgtgcaatgtcagtcgaatcgattgagctggtgattcagaacaactcaccgagaccccagtaaaacagtcctaaaaagtccttctttccacaggatctgtgatctgagtagaacccacacttgtacctacgatgtggcaatcacgatgaaaagtgtcggtggagcaacgaccttcaataggacacgacttgaactcacatatcaactagcaagatgatggaaaagctccatgtcgcacaccacaaccaagcttggtagaagaagggtcgggtcttgaccatgtcgaaaattacgagtagaggtaaggggatgataaaaatctgttgcaatgggagtacgtcagtctttggaccgtcttgaaagctgaagagcaaccttggcgactgactccggtggcgagaatatagccatagtaaccgatattctcgatcggcttggtttgcaaagcggctgtcaaaatccaggagatgacgtaaactgccatagaagatgccaataattggattcagctcgaaacacgttacaatcacggcggctcgtgcccagaactcacaaagactagcgcagattgcgcctctcctgagcgtaaagtgcacctctttcaagtagctcttttccttgctcggctccgggaacttggaatcgcagaagtgagcaacgacgggccaggcccgttcagcaaccatctcgtacagccacgtccgcttgatcacattggtcctcctgtctctacggatgctagacccatcgtctccgctcttccttctgttcctcccagctgccccgaaactgccgccctgagccatcctggccacccaggaaggctgcgtcgtgctggcctctgtatccggccgatgactcggcgttgcaccaccatgctgggtcgtgccgttattgaccacgctacccgtgttggcggcgctcccattgtcgcttttggcggcaggaacaaattggcggagatcgctctcgacagcaatgacgctaacgggttccgtcaagcctctatctccagatccgataatctcgtcatcctcatatccggcctgacaattcgagggcgtcctccccacgctcgagttaccgcctgtagcgcttctcgctcctctgggtcgatgactgcccatggcgctgatcgaatcctctccaagggcgctctccaattgcgagctcgacgaagggtgtgagggattcctcagacgtagtttcacacgcatccacgtctccttcagtgtccagtcgaacgacccgggttccttctcaaacctcgcccggttgttagcgttatgtccgatgtgctgcgtggacattcccgcatgcccgttttgatcggcgaagtctttttccccgatgatccgagggacgacgcccgatcccttcaaagcgttcttattggaaaacctctctctgaacgcgccaaacgcgcctccgtgctcgctccgtctttgcccattgttatctcccgcaaatttttccggatcacgcgacagtggtccgttgttcgagtgcgagttggtgttcgtattggcgtgactagcgttcctcatgatccccggtcgatctctgagcatatgatgatcgtggtgtaaaccaggatgaggcttttccgcctgtcccgccgaggtaggttcgaccttgtcttgggcatttctctgaccgtccatctttgccttgatgagcgggtccactccgtatccctttttgtcgaactccgaagtgggggaagacctgaacggatccctctgcaactcgttgacgacggtctggctgcttgatgcgctgggcacgggtggcgggacgttcagatcgtgctctccacctcgaatttgtcgctgagcgtaatcctgtgccggggtagatgtttgcacgttgatccgaggagggagattcgcctccgtaggtccgaggataggtacgcctacaccgaggtctagactgtctttcccgctcaacttgtccgaagtcggagaacctaaagatacgtcctgcggtttctctcgctgggttcctctctccacttgtccttcttcagagtcttgaagaacgcagtctcgttgctcgggggcgtcgccggatatctgatcaggtctcgcactggtcagccttcgagcgagtggcattgaatgttgtcctagataaaaatccagctctcctgactagaccgtaatgatcagaatcaacgaggtcgtgctaatatgtttgtggaattgctgagggtgtgtttccacagaaggtttcctcctttcaggaattccactgccggatcaaaaccgagattttgtcgtctggcttcctccaacaaagtcctgttagctattccagtcgcaattgcaacgaccgcaatgcccttatcagagacgaagtattgacgatgatctctgagatgttggccggctgatcctttcgacgaggtttaagtgtctgagaaggaggcgatcggtcctcggtgcgtggtcaaagggagacctgatactcggtctgatgggccggaattgttgcgttgatgacggtcggaggcaagagctagtggaagctgcggaaggttcgaaatctcgctgcgagacggggtccagaagctagactgtaacagttgacctcaagagctcaagacagaggcaaaggtaagacgggcgagatcatgtcagacctcagagagatggagagagacagagacagagagagacagagagagagaggtacaaagcgaaagacgctgctcggggtgggtcgagttcgagtgagggcgagggcgagggaataagacgagcgaaacagttgcagacttcacctttgcgattcaggccgggcgtagcgatcatcaaatccccctctctttcccgcgctgtagtgacaggaatgccgagagtggcgtggaagatccagcgtgttggggccgcgagcaggggaaactgatgcgacgtcagagggctgcacgtaaggttcagggcgtagaaaggaactttcacgcgccgttcaggggaccacgggtgtctgcctcctcccgcgtgtcgggatcactcgcagatcctactgggctggcccgccgggctgatgagcggttaccatcctaaggggcactaagggaaaaactcgccacacaaattgattacctctcaattcacgggaatcgagctagaactcgttagctcgaagctttcaaaacacactctagctacactacctgtctcaacgaccgttgacatcgtgcggagacgtttagcattgttcttgcatgatccgctctcgtcatcatcatcatcgagccatcgaggtcaagtccggactttcgcgagaccgagtcggccctcgtgactctgccacggcgagctgagggcggacactccaggtcgacgacgacgagccccacccggcgagaaggatgagacctgatgagacaacgacccccgaggcgacgacgacgacaacggcagccgctcctcgtacaaatcctccgaggagcagaaaagtcacacggcagccaccaccacaggcgcctcccttgcccagacgccaaaagggagagggctcgccgggagaaaaagtatctgacggattcgcccgaggttacgcaacctccgcgcgtcatcggccggccagccacggcgacgatcgccccggtgtagaggttgaccaagttcctaagagcctctccaaacgatgtctggtcgaacttgtgcgttaggcctaccatgatattgctaggtgatggcaggttgattgcaacaaaatggtagataccctgggaacatagcagggtgatgagcagcttgtctttgcgccactgatgtgttcagcatcctgaatgaatcctcactggaagccagatgccataattattgataggcgtttatcgtccagcgaaatcattccatgcgaatcgcatgaactatgattcagcccccatcgagcgggaaaacggtcgagttcagaatcgtgacccttcttgatacgaagtgacgcagggtgatcacagacagtatcaaggcgaaggccatcgctggctgacatttcaaaggtcgattcagccttgggatcatcaacgaaaaaggtctggggccggggttgatccgaaccaacggccggtaggcagtctcgtcttaaagcactcgtttcctactgatcgagtcgacccagggccgggaaatttctagtcgagcccgaagatctcgacctcgatttgcaacgggcattattgtagactgtcgaaatcatttgttgcaacccggatttgaccgcaatcggtgaaatgagaacagacagagtatcctggaggcctgaaaacgtactgtgcaagagacgaggagccagatagtacgagccttttcattgcaacaagatttccaaggacttcgtgggagtcaaggcggcattatgcggacagcgacaaatcattgtcgattcgagacatgcagagcaagccttgtcgtcaccgttgttgggcacagtttcctttggcatacaggcagagcatagtatgggtcggcccatggctgtgagtaatggaatcggcttatatctgtttcaaccgtcgcaatcgtgatggtcatcatatatacactccttccctccctgtggtgggatagtcaattccctgtgcggattcatcaattgagtttcctttcgcctcctcgccgaagtctttgatgctggatgaggaacacgcgccgctgggggaaatgctagaaccacgattccgctcatcaccgccacctacaacctacggtagaactccttggactacaagccttctcaagccggatgctagtaaccttcttaaatcgtgctttgcttctgggttagcagaaacccgatgagctttggtaacgaggtcggtagctcgtcccgcaccgatttaccgcccctgatccgccatgcaaccctggactcgaatagtgtattccgtatatcgacgtacgcagcacgcatcccttcggccacaggcggcactagctaggatcgttgagagatgtcgagagacgccaacgatgacgatgggcagagcgatgtattctctcatccttcacatgacaccggatcgatccgtccgttccgtcatacacgagtttgcttttaaaagctttataatcgtacactcgattcctcatccgcgtcccgtcccgtacacttatgtaggtacctgcatcaacaaccccgagttggtcgcaggcaagtaagtcacgttcttgttacccgacaacgatgtggctgtatacagacgttcccaagcggatcagtcaagatgctacgctcgatgttaaagtccagagaagcggacttaccgatgtccttgctcgcctcgatcctcctaaaggtgacgaaagactcgccagccttgtccaaagccttggagatggtgaacgcagcctcggcttcaccctcggctcggatgacggcggcctgacgctcttgctcggcctgtcatggcgggaggaacgtcagtcgggatgatcgcgggggttcatgaatgaacgggcggtgggcgagggaggtggacgaaccttttcgacgacaaacttggctcgctcggcgtcctgctgagcaatctgtttctgctcgacggcggtggtaaactcctttccaaagctgcccaagtccgggtcaaattgagagtcagctgtgaaacccccttgtcgagcgcgtaaagcccgtcgtgaaaagctactcacgtcatgtgcgtctgtgtcgtgacgaaagtcgagcccacgtggatcagcctcttcttcagacacgccccagcccctgaaacgcttgaagccaaccgatcgactcacgatcgagacgtcctcgagcaaaatgttaaactccctcgcccgggtcaacaagtcctgcctgatctttgccgagacgacctctcgctgggtgatcaattccgccgcgtcgaattgagcgacggtggccttcaagacttcgttaccgatggaggggaggactcgctcgtcgtagctgcacaggaaagtcggtgtgagtccagttctgtccgaggcgatgcgaaagggaaagtgtagaaggactggggagactcactcgagaccgaggttctggtagatcttgggcagcacggcgatatcaggcctagacatgaccctcaaggtcagggagaccatttgcatatctatcccattcgcgagatgtacgatcagtcatctcgaaatccgagtcacgggatgctttaccgctgaacacatacccttggatccagtggtcgtcgagatgttctatcaaatcgcaagaacagtgaagatcgcagagtttcagcaattcggcgatgcggacatcattgaggtgggagacaatgaaatcggactgaccctgggcttgatcctgacgtcgtacaagatggccttttgcagccagggaacgaggaaatgagtgccctcgcccgaggcctgataggtagaatcgtggtaggtggtccgaagcaagttcgtttcaggtcgtaaacgtggacgagcagacggtcgaaagaatccagggtgataatgtcagggcgacaacgatgaagaagaagaacaagaacgtgagggaggagggtgcagcatgtttcgatgagtcggcagcttggaaatatcgactatggacgagcgttgactgacctcgttcttgactccgctgaatcgatcgaacatgacggcccggtatccaccaggaacatcatagatcgacgcctggaaagccgccgtacccagtgcgatggggactgtgtcgttgcggtcatggagtggtggtagatggtggtagattattggcacggaagaacataaaagaggcgagcaacaagtataaacgagaaagtgtcagtaagcaggcaagcacgactcttgccatcgacctcgagcctggtcgatcggcattcgccttgacgtaccgattagcctggagagtgtgtttcctagagcagccattgttgatgtctgattgtctgagctaacgggtttgttgcaattgagtgaaggggagcgatatgagatgatatagatgttcgttcgacctgtagagatgagcttcgtcctcgatcgatgagcaagtgtcgacggcggcggcgatgtgacccagagagctaagctagctaattgctagtagtgacatggcttatttacgcgtcgccctagtccccgcgagacgtcagcgttcaaacgatcacggcattcagcaagatcccgtgttgaatgagcagcccgatcttgatcgtgaaacaaagacgcggacgtttgctgccaagacagaacgaaggggtcgtcgggacgactcgagcactcgtagctctagatattgacgagcaaattcagtccggacgatggtatagcaatctttccctccgctctcctctgcctctgccgaggtaacaagacgatcatcgatgaacggccttgctgaacagtgaccctgacatggcctactacaacaccctcttgacctcgaaccagctcttcaggtaggtcacattccacgcacagatggccacgagcaagaaactctggatgatggaccaccatttgacacggtcgttctattgtacgcaacgtcgtacgatcatgaagccgtcggatgagcccatatctcgctgaacctggaataatgagacaatccgactcactgtagattccgcggctacgttgacaggcaacaaaacggatcatccccgcgttcttccatcagtttcttcctactactctgcatttctgaaagccccacgcccgactcactatcccgatgcacccgttccctgacaacgatatactcttgttcgtccttgactccctgtaacccggtagacaaggccctgatctcggcctctaccggagccacctcgcccgaatcttccacgtagagaactccatgcacgttgaagctgcacgcatcggacgagatcttgcagggatcagcactcggaacagacccagcagtttcaagcactagcgcgaagtatgccatactcggctcgaggtaggggagtaggggagtagaggggacggacacccgggctcacctgacgactttggggctgacgctgctcatctcgttgctgaaacaataagtatgtctcccatccttggctgcggtgaatgcgtacgtccctgtcgtcttcctgtagatactggatagggtcgagctggatgggtcttgaagctgtagacggcagacgttgaggtgcaggatggatcgacagcccagccgaacgggagatcaagagacacatgagtggcagagggaagggcgagacgaatcgtatcagcaaagagtgaacaatgaacgatatctgcgccgggatgaactcacgtagaaatcaatatccatattcccgcccgctccgacctggtacgtgatcgtcatctacgccggaaaagccatcggatccgcgttcaagagcgatcagagaccgagcacagagagaaacgagagcaagaaccacctctgatcagcttccctactcttactcgcgccttctggaactgggtctcggtttcgaacccgatcccacaacctgcacaaccccagcagctcgagttcccgacccacctgatcctccacatgcaagtcttcaaagaaacactctttcgcccccgctggaatatctatccgatgggccgtgatcgtcgatagtgtcgataacaggaagatgaggaggagaggcagggctattgggagggagagggtcgatgttgaggagaatcgggtcgagcgcattgtgttcgagtcgggtttgagcgagttgcaggttcgagctgatggcgagtcagatggggcgtgcaccgggctggaagtttgtgagggtcttgaggccggatgtgggccgggtttagctttatctgtatcttgtttgtattgagagtgggctgaactggacgtatgaaagggtgaataccgagtgatctgatctgggccgaggttgttgctgtgatctttagctcacacgaatcactcggatacgcgtcgacctccactccgactactctgggatctctaaagtatgaatacaacaacagggagctcggagcgattctcaagattgacatgtgacggggttcggcactgcaactcgtcggtcgatagtgtaggtgacaatgcagcgggtgggtgtgagtgtgtgaagatgctcatcgacgacgttaagaacggcgccaagacgaccgatatcttcatagcgtgattttaacctcgaatcgtctctggttatcattttgcccagtggtcgtctcagtcagacggccgagcaagatgacagatacgatcccaatcgaatggaattatcatcaacaagcatctacatcaatctggaaagctgtgcgtcacactttatggcgatcataacatccggacctcgaatcgttcgaaaacgaatcgagggacccttcctcgaccacctcaaacggggacccttttatttctattctcgctttctccgtagtatccttcaataccctcgtcggacgtccagcgttagttgaacgcgagtggtacgtggattcgtatgtcagtgttttaagctgatctggagaagcttgagaagagaaaaaggcagtttcggaaagatgtcgaagagagatggatgaaggttttggtttggtttatatactcgtcgggtctcgttagtcaacgaagatttgcttccgatgagagccgagactcgaggggaaccaggtgaacgaccatcattcactctaggtgctctatagagtagtggtcagtatcacccgttcaatggtcagacatcaggcttgagcacaattccacaaataggcctaaggacgactcggattccactttatctcgttggcgacatgccggactacccggcgcacagcccgatggacgagatcgagaaccggatggaggaggacgatgacggcgagtaccgactacgttcgccgagcgtcctccatgagcacggagacggacaagggcgagatctagaaatcgaggatacggacggagttgacgtggatatcgaaatcgagtcgagtcacgggacagacaacgacgcggccagggatgtcagcaatgatgtcgacctcgaaggggatcgcgagcgcgaccacagcccgctcaagctggtcatcgatccggcactgcaatcgccctcggacttgacacccgcccgcccccacaagaaaaaacgacggactcgtgccttgctctcttatcccgacgacctcgaccttgaatacgatgtcgaccctacctcgacccgctcgcgatccccaacgtctcaccgtatccgtttggatacgagttatatgaaacaatcgaactcctccttgatccatactagaaacctcttgttggaagaaaacgcccggttgatggctgatctcaagcggctggatggtgtcgtggatgggaactcggaggtggacgggccggagggaccatgcgagcagaccagtggcccacgagtggtcgagggtggagacgagcctggagaaagaaatgcattgatgcatctcttggagcagagtttgaggcaagagattgacgagctgaaagctcggctcgatggatcgtcttccgagggaccgatcaccgcgaccgagcgggtgacgactgatcctgccgcggatcctgaagagatagcgattgtgggaacaagcgcaatcggagcctcaacaacctcgtcaggtcctgtgtcgaccgcgaccacggccagcaacccgacttcgacctcgacgctttacactcttatcgcccacctagattcatctatccacacccatacacaatcggtcgaatctttaaagtatgaattgaaccggctcgtccagcaagaccttcttgcgcatcggacgtcccgcgacgctactcgcggtcggttatggagagacaccgtacgagctcgacgtcagcaacatcagtctcaactccagcaggcgccgacgcagacggaaccggacgaggagagcgcagaggacgagggagagctcgagatggaggaaaaggagctgatggacggaggggaacgaaacgagttggagcgggccatactggatatgagaggttacgccgaggtctcgatcaagttgtggaacgaggtgagccggatgttcgcgtctaccgagtcttcgctcttttcgaaataacccacctcgaactctcccgattgattctgcaggaaaatcgcctgccggacgcatccaactacctgaacccagcctacccggtctttgcgcttccctacgttcccaagaagatgtatcgtatcccaagaggaagagccgcgatgacttcgagcaagaaagacattcctaccgagctacgtcggctcatcgctcgtcgggttcgaggcagagcggacgttgcgctcgacacgccgatcccggaagacagcgcgagtagaacctttgagcctcccaaggatccagaagaggaggaaagtccattggtcatctttgagcaaggcagaaaacggctcgcgctcgttcccgcgccttccgaaccgagactcccaaagaaacgcggtcggccgagtctgctggacatgcggatgaaagggctcgagccaaccatctttgaatcgttgacgatctctgccgagctcaatacgagagctatcgaaggaatggggagcagggtgggaatcgggatgggacccaccctcttgccggacgatgtcatctaccccgacccaccccctaatgtccctatgtgggatccgtcgaatccccaattccatactcaggtaccgtatcaaatccagatggccaggcaagagatggctagccgactagcgaggtcattcgcggtccctgcagtagacatggccgattatcttccagagatggctgataatgatgcggcaaggcctatggatgagttggaagatcgaccgggatcatcgtcagagcaacgtcaagggagcgttccagacttttccctcgaagacttggagaggcatggtctgttcgatcacgagattcctcagcccctaccccaggcggagaaaactcagcaagagcgggaaaacgccgcggcgtacaacaagatgcaagatttggcggtgcgcgagttgacgtgcgagaactgcggacggacgggaacgtctgtctggagaaagttgaccatcggggaggacacgttgaaacggacgtaccgcgtgtgtaatcgtgagtctgtccgcactttagtcctgctagctccgttcatcctttgctcatattcgtgcttcgtcgcttcggtaacagcctgcggactgcattaccaaaagaactcggtcatgcgtcccaaggacatctggggagatgtcagcaaggcgccccggaaacgacgacacgcaaaaccgagagggttcgggagtgctggcgccgccgctaatcagcaacaggctgaccaattgctgcagcaacaaatcgagcacatcgagcttgggcatgaaggcacgttacagatggaaatggaccttaatccggacgatcatatttcgtaaacgacagactggagccgcgatgactcttgagctttcatttttctttgggttgtacaatcaatcaagcagtctctgatagatatataatgagtgtggggacaaacgattgtgttaaccatgtcgacttgagctgaacaatttggcagacgagagaatctagcgatcaagcatcgttgacgccctggttgatgcgtaacccaaaggtcttttcgaacgcgccgatgagaagatgagcgagggcttcctcttgagctctgtactgaggggattccaacgaccactgggttttgccaggagtgaccggctcaatgcgagcgcgacccggagctttcggggtaccaatcggtgtcggtccaccttgacgtgcttggtcccgttcgagcttttccttgatcttcgcttcgatcgaggaacgttggatctggctttcggttctgaattgggtgttggaagactgcggagtggggatcatctggttcgggatggtagaagccggtttggcagaaagatccagcctcgaggcgggcggagtagggggcaattgcgctcgatgcgccgcgagcgtccttttggctagtaccgaaatggcgcctgcatgatgtacgatcgtcaaaagtcattcgtgggacacaatccgaactctgtcatacttaccggccgagcaagcgaagagatcccagtaaatgaccgaattcttgctcccgcttgccttgtgctcatcgttagccgcaatcttggacaaaagtgacatcaaactatggtagggggctagaggactcttcaggaaacgaccactttgggcgggagatgcgaccacagatgaatcattctggcgacgaggggtctgttggggtgtttgaagacccgcggcgttttcgatgactgtagattcaggggcaatatcgatggatctgcagagtagcatcaaattctccaattcacgaggaccagagggacgtaactgcacgaccacgaaataaacgcttcaatagtgagcatattattcggcatcagactgacttcggtgatcaaagcagcgtgagtggaaagggtcagagtgaccggccgggctcgcggaggctgtcccaagacggcattttgtcggctgcgtaacacttgcgtggcggcctgtctgtctcgacactcgaaaaactgcgcaagcagctcttgttaggcttactgacatccaacgtcttgcagaatcagaactcaccaagtagtccttggcttttccatcatttcgatcaagcatgatatgaacgttttgaatgaggtcatcagccagggtgtgaggtggcaaaaacgccacaaccgcttccggggtcacgtcctgtaatcgtccggttttagtaaccgatctagcgttgtgatgatgaccacacttacccaggcgacattgtccatcctgacgactacggtctcttcattctcgtcaggtaacgcatcaaaggcaagtcggagttgtgtttctttgtcctctagcctttccgcttgctgtctgacaggttgcgtagccaacagatacggcactattccgacagtctccttgccgcatccgaacgacgaacaccgcgatcttccggggttcccgccaggtccgttcgagcaaacggtgttgaggacagcgtttagacagtcaaagcacgcaagatgctgtgagcagtacagagatgatcagcgaaagtgccccatgctgagcatgggagcaacagatcctcacgtaacaaggctccatcaacgtcaaaacaaccgtcgctgtcggccttccgcacgtgtcgcaggtcctggtatccgatacttgagattgcgaagagggagaggtcttgatattgtgagagccaggggaagccggagacacgacggatccatgagtactggagatactagcaacagaagaggcggaagaggtcattcgaaccttgagtggctgatggtcctcttccttgataccgaactggagtatccgaccttggaaatctcggcgcatcgcagggctgataccagtgagcttgcgtgggttgtcagctgtccctttatcctgttctctatcgccaatctcagtctcgacgtccgagacttgaccactgtattcggacgaagttttgcgatgccttccaaggccgaaagtggcgctgattcctgaaacggtacctccagtatcggaatgagctgagtgatcctcaacgtcgctgctagtagtgatggattctggctgagcaatcatgctttgaaccgggcgtttctcgtgatgcgtgctgcgaacttcagccgacgtgtgcgatcgaccatgtttgttcttcttggacatagatcgcttcgaaagctcctcttcactctctccctcggccggaatgcttgtcagagtcacggaacgcaaacgacgttgggggtcgacgtagctgagggatcccgaactcgccgtgcgtctcttcacttggatggggctcacgggttgacgagtcaataccactccatcagaagactccatgtgagcatgtaccagctccaagatgctaggctcgcgttcgaccaagcgatccgaaggagcgatacctattgcagagtcgtcgtaagcaaatgcaaagacgatgtggagacgatgcttactcggtctgccctttccgagttgagacaatgtccagttgcgtaccctaccactggcaagcgcttgcgactcttcctcggaaccgggaagtatcccaaagtcgtgagagaacgtttgcagattgttgcttttgagaccctgtttggcgagactcccgatgaaaccgataccggccatgtgtctaccttgaccatcgatcaatgcgcgtgtttggccttgatgagtcggcaaaccttcgactggatcttcggtctgagtgtcgatgggacccgtcattcggttggagtatgtttcggcacgatcgggttcttgtccaatgtctcgcgagaggacctgggcgcggttctcgggcaaaaagccctgtggaatgaacggaggggttacggcggaaagactggcactccacgttcgagtatgagtagagtaggtagagtccggcgctgtaggtgaatctttttgttcttggggagattgggctaaagttgaagggcgcaggggcaaagaagacttggccttgatccgtcgatagataataaatgatgacatcgatcaacatgagtagtcagggtgaggtatgtgtgctttactcacaccgcgttcgagctcagagttgcccaggacctgtcctttcctctgtttagctagcaactgtgacctagtctccgttttgacttccgttgcagtgctatcgtagtctagctcaaagtctttgatcgttcgctcttcttctggcttattcgcaacggtcgcaggaggcgaaaagacctcttctgcgtcttggaacagcttcctcgccttttcgagtctggacgaggtagttccggttcgcctggaagaccttcgggccgatcggggctgactcgaaggcgtggctcgggtcgttgcggcatcaggagtttcttgattgggagtaatggcaaaagtagcggtgggtttggctgaatgaggagtagcggaatgtttggtctcctccggagattttgaagacggaacgggggagctgagtagatcggtgggcaacaaagtcgattccagggcggggctgagcgggccttgaacgagcctgttggacaccgatgccgcttccgaagaatcatgatctagttccaacgcttttgaaacctgagatagctgaaggcatcacagcaaaaagaccggcgtcgataaaacggtttactagcgatcactgacgacccctatctcagtgtcggtcattcaagcttacctctggttccggatcgtcttcgttctgcttttggaggtctggtgtagtgctctggtgactctttctgggttccctcttcatcttctgtttcttcggacgaactctcttgaaagaaccgatcaaaaaactagttcccatcggcacagcttcgtcgctagtatgtaacttggccaaggttgtcttgccggcggtatcgactgaaagtttctcggtagagttttgttgctgaataccagccttgtcgggcattggatacggtcggacctggtccttccggtaagtatcctcgagcgaagacatcgcgctacgacagcaagggtatcaattgggcgaaagactgcagataatcttgctcgtttatcagtacattcacttaccttttaatccgtagtggtgggatcaccagacaggctcttatagaatatatcgatgtcgatctgaccaagtgattcgggaagccggattcggtatgtgaaaatgagtgatcgctggattgcttcagtgaagcgtttcaggtggccctgggagcaaggtttaagaggaatgaggaggttgacgagtcgttggacgtgatgagatggcagatagatgtgtgatggtgagattagggagttgggatttggtgaaaagtagaggtgaatgatgttaaaaggtgtgcgacgatattctgatgggaactgatgagagatcagagagagggaatgggcatgagttgatcagttgcgctaagcgagtatttgcttccgagatgaatatgcttccgacgtgcacagtgtcaatccgtacaaggacgagcctcggttccagaccgggctcaggcagacgacagctacggttcttaacgctacgtatgtaggaggaaatgtatctaccctctcggacggtaagttcgggagttgctcaaggcgtcatcgtcaggaatgcggagctttgatcttctggcttctatcgaattcttgacgacattgctcgtggaccgatcagaatcgcgagacaaaagtcgcttctacacgcattcatggatatgagaggtcaggacgagagccgcccagatttgcagtagcgccggtcggacttaccaacccagtcgaccagcttccttactctcctcatgccgatctcgctctcaagtagtcgtcgatccggcctgtactgctgatcctccgcagagatctttcccttgtgcctcgcacagacagcctcggcgtcctctcctctttgccgagtttctcctctgacgacatcacggatcatggtcgcggctgcacattcttcgcagtggtcggtagggcctcggttgtagtatcgatcaggcatggcgcgatacattatggtgatattggtcgggtagctggcttgcggacgcctcgagctgaccgtactaacaaagcgtgggcgcgctcggtatgcggcgtccttttccgctttgcgcttgtggtcgagatctagtgaaagggagacatatggtcagcctaccaacgtgacagctgatgagcaggttgccagtctcttactcttgatccagacaacgtctccagacttcagacgcttgacgtcactcgcatattcgtcccaaaagtcgactcgcagcaaattcttcctagtgccccatcccgccgagtcgtccgctcggccgttccctatcggttgacacagctgtacctcacacttggcactgaaacgctcggtctggccgacttcccaaacgacagctaggagatcaacccgtctcgactccccatcggggggcatgttgagaagctcggtgagatcggtcaggctattagcggggatagccaggtacgacggaaaagtgcaaatcgattgcgattgactggtgatgaggccgcttcccgtcttgccagtcggattgagtgtttgagaaaacatgtccgattccgtagagccggtcggacggacatctatacccacataaagcgatcacatggaagcgttagtgaaagtacggggatgtggtatgggaattctcaggctgaccttgactgatgctttgttccctgccggtcgacagccagccgctgtgagagccttcgactgtcgtcgtgttttcaccgtttacggtctttattcgcttactgcgtttccccccggttggagtcaactcccagctgtccgaccagtccaaaccagccgcgcctcctcctggccggatggccgaatctggcgctagcgaagcagacttgtctggtgacgaatcatgatctcgacccaagtacgaacaatccgctcgagaagcgattgatcgagatccgtcggtagaataggatattggtagattaccggctgctaccgttgacctgagtcgaggttcatcgtttacgatgtgcgattcttcagacgaggaggctttcgatgtcggaagaagagacttctccagtccgaggtttatcgctaagttagagctcttgcgtcggggcagaataggctcaggccaacccatccccgtctcattgcctaagtgaaagacacccctctcgttcccactcagattgtcgatctgagtggaagtcacgaacttcgtgccagagttatcaataatgtgctccgcaaatctcgaagattctcctttacgcgagatcggcgtgtcttcgaccatattctgcatgacgctcagtcttgaacgggttttgaaactatgcaaccgttcgagccatatcgcggatctctcctcgttcgaaatttgtcccggagtatcaacggccaaagtctgagctcttgcaagctttgacctgccttttggtcggggatcagtctcgccagcgagtaagatgggctcagatctcagcggccgattcgacggcgttgacggagagatgtgtgatagccgtgcagactttcgggagacagtctgttctggtgtgtctaaaacactgtccgaaaggtcgagcatcctggtgtccaacagtctcggccattgcggcgtcttcttgcgagtgctgtcaggcacgatgtcatcaaggagtttcctcttgaccggaacgctcttgctcttatttccgtgtcgactagacgcttcctctgtatcgctggccgatcgacccgtctgtcgcgcgatcaggttgtcttccaatggtatcctcaagaaatcttcattgaggctccggtatgctcgtgtgcggtctcgccgcgatggactcaggcggcctggcacatgcgctcgtccgacttttgaagtcgatccgtccttgggtccactgccgctcatctgactgttaatcggttcatcccactcgaacagatctgagaagcttccaacttcatcctcttgagctgctagagcagacgatgtctgcgagtctgtgtaggccagccgatgaaagtggattgtctgaaagccggccgtcggatggttcttgactttctgattgacgatctgcggcctaatggatggaggtggatgaaagacgtgggtagcgtatgtcacgctcatctccgtaccggaactatctccacagattgtctagctcgaaagtaagtcatggagaagtgattagacgtgtcgccagaactgaaaactcgggatcaggtaatgatcaagtaaaagaggcccgatcgagctgataacactttgtcaacaagagagaacgttgacatcgctatatccacctcgatattacggcaacttagccggtatatccaccctcatacagggaatgttgagcagtagtagtcagtaccatctggaaatcggtgaaccttgacctgttataataaccattatcaagtcatacaaaggtcgcctgattagcaagtgttgcaaagacgaactcttgcgtctgaatccttagctagcttgaaatctgatcggtcaagcaagatcgagatggaaggacacaaccccgagctagtccagctcctgaacgcgctcgcctttccctcagaccaagctacttatactcaggcggacaatgcgctacaatcaggtctcaaacagccgggtgagcagaaatagatctgtatcactggcttagtcttatgggctaggtactgatcaccggggatgctgcttcttggtcgtaggtgtctatggccagctgcaagctatctcggccactcgagcgttcccaaaagaggtcaggctgctgtcagctttgctgatcggccgagagctgcccaagaaatggagagcaaagacgtgagttcctatcgtaagattcggaactcaacggaacatgacctcgaatgctgacattcgacaatcgcgccggattgtgcagtatcgtgcccgatgagctcaaaccagagatcaggcagaggttctttgagtttttcgacgaaggcgattatcaggtgagtctcgatcgactcgtttcctgtattattggaggatatggactcatgtactgtcgcatacttagatcgctcgagctcagctcaggacgctggtcactattgctcgacaggagtaccctcgaacatggtaacgcccctcattgaattcaagataatcttacgctcatggcatgtcttcttgctaccaggcaatctcttcctaccgacctgttgaatcctctcacatcctccttctctcatatctcgactcatcctaccggtgatcttcaggatcaagagcgtaacaggcagaaagtcatcctgcttaacagtctctggacgtggaacgctttcgtcaaggaatggaggagcgtcaagctaccagtgggtcaaaagctcatggccgaagtaagtctttcgatatacgacacttgatctggctagatggaccatctgatatccttctcgtcagttcatccattcactgcggacgccgatgtaccaatatttggacttttttatggcgagagaacccgtccttgacgattgggagctttgggaaagcgccaggtattgcttcaagtgagtaagattgttttacgtacgcgactgtgctgttagctgaaacgggtatacgaaggatctgcgcgaggcttgcagaatgggaatttagtcggccagctgacaagcgggtggatcaggatcctagtcgtgtgagtcaagccgaccagatcatcgacatggagctcagctgatcctggccttgagcaaattgattttcacagattacgcaactcgtcaccaactcgctaggatacctgtctaccttgcaaaccatccgcctgcaacttctctcctcgcccttttatcatgacgtatccgccaggaactatccggctgcaaacacgccccctgcaaggatgctgaagagcttgaccaaattcatcagggtgataggcaagacgtacgaggcgctcatgcatattgatccgaagacgtttatcgcgattcctggtacggttggagctgtcggatggtggtggggcgaagtggcgggagccgccaagaggggcgagatgccgaaagacggtaagaggttcatcgtctgtttcagcaaactcgcgcttacgaggtcacattcgtaccgtaccaccctgtcagatgatgagaccgccaaataccccaaaaggttcttgctgctcgggctaatcctgttcaagaatatcttaccgaccttgtccgtcgagcatcccgaaggtcgttatctccggcgggttctcatagagggaacaaatccactaacctcccgatcacccttcttcaacagtctttaccgaccaatttatcggtaatgcgttcaaccttctggtagactatctgttgcctatgacgaacaacgattgggaggcttggaacgaggaaccagaagaatggctggtcgaaaatcttgacgtctctcaagcgtggagttacgatttcagggtaagaccgcttccatctcaacgtttccgaaattgacatctaaaccggttgcttcgcccatagccatgtgctgagcgggttctcatgtccctgagctccgcgtcgcgggggcgcaatgtgatggaacctcttctgcttcaaaagttacaagccgtgatgcgtatgttgctagccgtctccaatcagcgcgctcggccgaaccttacagcttttccttacagctctatccaacgacaagctagaaaatctgctcctccaggattcggttttatgtgccgctggaagaatgtcacgggccctgatcgatcagatcaagctggatcagattcttacgctattggcaccggccatcggatccactagtcaggagtacggttgtccacgcataaaagataaaggcgaaagatcgctcattctcggtgttttgcagaaaccgtattttgaaagtccgtgcagcctggcttattggacaatgggtcacatccgatgaagatgctgcacgactcccggtagtctggcagatcatgctacatctcttacctgtgagaatggacgagtcgtcggacatggcggtcacaatctccgctgctatggctttgaaagaatgcatcgacgtgagtggttattctctcatggttactctcttccaagtgttctcactacggtttataccgatcttctagctgtgggagctggatgtctccgttttcgagccctacatcggtcagattgtcccagacctgttagtgacttctaaatccccgcttcgagtcgctctctcatcgatatccaaacagactcaaagcaatcgacgcggcgggaacattgtctggcaaacgcgccattctcgaatgtctgacgatcctcatcgatcgcgtgcgaggaaaggtacgtttccaagctatagtatgaatcgtcctcgagcctagctgacctatgtccaaacacagatcatggcatatctgccagaaatcagcgcagccattccacaactatgtcagtccatactcataccgcaatcgtataaggcgctgaccctcttttctctggccgacacaggggccggctccgccgatttggatggggaatggcttttcaaagcctccttggtcctgatggcgacgaagctggtagtcgtgagtcgagtcgacggtaccacgcagagggagttgcattcctgactcttgatcgactttgcaggctgctggagcccagaccgcgcatatcttgcctctcattgtgcccctaatcgaggaaagcttgactggacctgctaaagagcacttcgaggaggacggtatgatcttgtaagccaagcctacccgagatgactcagggcatgcagactgattggtaggccaatttgcaggtggcaagtcgcccttcgagctgtacccacactaccgctcaatgaacaggctggtctggcgaagcttttccctggtcttctgggactgcttgccgagaacttggacctcttacgatcaaccgtctctctcatggaatcgtatatgctacttgcgggagaggatctcatgcaggtatgacttggtcactcaccgaggatcgcgaccttcagctgatcaggctctaattcaggcgtacggcgatcaagtgatcaaggcgtacgccaccgctctcaaccaggtacccaagggatcaacaaggatgttgttagagtcgcttgatatcgtcctgcaagtttccagcccgaccacctggatcacccacttcgtcaatactggcctggctcagaaatcttgcgatgtcattgatgagcctaagaccggcggacccgagctggcagcctatgacaccttgttggcaagagtcatattgagggaaccgaccgctttcgctacctttgtcaatgcctacgcccaaacgcaggtcacagccaacgccgtggctaaacaactggagctgacgatcgacgcgatgtggcgtgcctacgaatatgtcggggatgcaaagaggcgcaagatgatcgccatggcgtttgccaatctgttattattggtaagttcaggctgtacctcaaccagaggcaaggctcgtctcatcatttcacttcgccttgcagggagagggagctgttttcgaacacatggaaggggaatttggtaagttcctgctcggccgcaaacaagatatatagcttatgaccgcctcttgttggatagctaacgcttggttggacaccctcggagagatcaaggaacattcggaggctggcagcgagtaagtcgaacgctatgcgcaaatacatgtatgccggctgaacaggccatcgactgcattcagaatcgtgcgcaactggcaggattcccaggcgcttctggcgagcgacctcgaaggtaagccgtggacatggggcatctgtcatcatgggtcgctgagaaatcctcttcactatagatactgaggaatacacccgtcgaacggcactggcatcagcagaccccgtcttctcccagacgctcaaatcctacatcgccgagcgactgacacgcgcgcaagatttgggaatggggccatattgggaccgcttggatcaaggcatcaaggactccctcacgcaattcctttcttaggcaaccacacatcacgaacgaattaatgaatgaccgtaatctgcgaacgctcgactctacgcatcgtgtatcagatcgcacatagatagattcagatagattccccaaagagggacatgtttcacgcttgagccaaagcagtgcctggtcgacacgtcatcgttccgtcacgaaccgcggataggcctcgatcgttcatcccctttcacataccgcacttgcctgaatcatcaatctcatgctcaaaggtcgttgctaccgttaacgatggcatgtccttccgttcatcatagccaatacctatcatacctgctatccaccattaacccagtacaagatagagatctagaacgagcagaggccgtagagaccagcttgttaaacaaaagcgaccataacaaacaaactacaaagctacaaatcgatcgatcgggcagtctcttacacaaaccatgtcagccatgcaggtagacgagcatcagagtaagtagtcagctttcttctttcactttcatcgtgctgactttgaggtgctgcctgtgcctcattccagtcgatggtaagcacagataagctttgttgtatcaggtgaagaaatgactgaatagcttctgtttgacagagagtctgtactctcgacagctgtgagtcagcccgctggactcgctcatatggtgtccttacagagctgactcaatgattcctatttaaaagatatgtcctgggtcacgaaggtgggtgctgtcgttctgagcagataattgatgacatgctcatgaaagtgcaattcgcctcaaaacagccatgaagcggatggcaacttcgaacgttctcgtcgttggaatgaaaggactgggagtcgagatcggtgcgcatttccatcagtcttgaccgaaggatttccacaggccctgatgagatgcatcatctcgtaatatagccaagaatatcgcattggccggtgtcaaatcggtgacggtgtatgatccattcccagtagaggtggcggacttgggatcgcaggtcagtctcaattccatgtcttgaacgtcgttgttggcgagaagtcgttactgacactcatcatctcgctctcttagttcttccttcgagaggctgatgtcggcaaacctcgaggagaggtcaccgtccctcgtctcgccgagctgaacagctacgtaccggtgacacttctggaaggagagggagaagtcaccaccgacatgatcaacaagtttcaggtcgttgtcttgaccaacaccaccatgagcaagcagatcgagatcgacgaattctgccacaacaatggaatcgcctttatcgctgctgacgttcgaggccttttcgggtaagcccggtaatatccagctcttacccgtcactgatgtgtagctcacccatgtgtgtttgttagatacgctttcaacgacttcgggccgaaattcacctgcgttgaccctaccggagagaacccattgagcggaatcgtggccagtattgacaaggtgagttcttattcttcgtagacacctcaatccgtggggcaaagctgacagaggcgtctgcgctttattctataggacggagatgccgtggtgacgtgtttggacgagcagaggcacggtctcgaggatggcgactttgtcaccttctccgaggtcaagggtatgacccaattgaatgggtgcgagccaaggaaggtcacggtcaagggcccttacaccttcaccatcggcgataccaccagcttcgacgactacgtcagcggcggacttttcactcaggtcaagatgcctaaggacatcgcctttgtcagtattgacgaggtcctgagtattgcttcttaagctaaatctacctttttgtcttcgtcttcatagaaaccattgaagcaagccttgagggagcccgaatacttcatgaccgactttgccaaatttgaccgtcccgctaccctgcacatcggtttccaggcactgtcgtcctttgccgatcagcacggacgattgcctcgacctcgtcaccctcatgacgccaatcaggtcatcgagattgcacagaaagtcaaggccgaccttggtctcgaggatgagctcgatgaaaaggttcttaccgagcttgcttaccagtctcagggagaactgtcgcccatgtgcgccgttattggaggattcgtcgctcaagaggtcctgaaggcatgcagcgccaagttccaccctatggtgcagaacatgtactttgactcgctcgagtcgatgcccgatcagatccctactgaggacgagtgtgcccccgtgggcaaccgatacgatggacagatcgctgtcttcggaaagaccttccagcgaaaaatccaggagactagggagtttttggtcggttccggagccatcggatgcgagatgttgaagaactggagtatgatgggtctaggatccgccggagagggttgcatccaggtcaccgatctggacaccatcgaaaagtccaacttgaacaggcagttcttgttccgagccaaggatttgggcaaattcaagtcggagagcgctgctgctgcagttgccgagatgaaccccgacctcaagggtcgcattatcagccaccaagaccgggttggagaggataccgagggttagtactcccgacaatcagccagcaatgttcctgatgacgctgattgtccattatcattagacaagtatggagacgatttcttcgccaagatcgacggtgtcaccaacgctttggacaacgttgctgctcgtatgtcaagtggaataagagctcccgtcgtatcagactggctgattatctcgcttggtgatttcaggacaatatatggaccgacgatgcgtgttttatcagaagcctttgctcgagtcgggtactctcggaactaaggccaacacccaggtcgttattcctttcatgaccgagtcctactcgtcgtcgcaagaccctcccgagaaatcgattccctcgtgtactgtcaagaacttccccaacgctatcgaacacactatccaggtcagtgttccgcgcgatattatgaagttacgcaaattgataagccttctcgattttacagtgggcccgggaacaattcgacgccttgttcgttaacccgcctagcaatgtcaacctgttcttgtcgcaaaccaactacgttgacaccctcaagtcatcaggccagcagtacgagaccttgaagaccatattggaattcttgaagacgaagaagcccactagcttcgaagagtgcattaaatgggctcgtctgcagttcgaggaagactacaacaacagcttgaagcagctcttgttcaaccttcctcgtgatcaggtaagctgaagtaatctcgcggaaaccggcccctgttcaccgttttgtcttcaggttacatcgactggtcaaccattctggtctggacccaagcgagctcccgagcctttagagtttagctcggagaacgtgagttatcgccgaccataaatttggaggtgaacgaaagctaagcatagcttccgcgtgtcagcctgtcatgttggattacatcatcgcgactgccaacctccacgcattcaactatggcttgaagggcaacgacgagcccgagttcttcaagaaggtgctgtcgacgattgacgttcccgctttcaagccaagggagggtgtcaagatccaggtcaacgagaacgagccggtcgctaatgagtctagtcagtacatgcgtttggcacacaaggcgtgaccgagcctgactgagcgtctatccgacaggtggtgatgccgacctcgaccaagtcttggtcgaattgcctaagcccagcgatatgcccggtttcaggttgactccggtttcgttcgagaaggacgacgacaccaatttccatatcgcccagatcactagcgcttccaacttgcgagcgattgcttacggtatctcccccgctaccgctcacactaccaagcaaatagctggaaagatcattccagccatcgctaccactacggctttggcgaccggaatggtctgcttggaggtgagtttacccctcgccgtggcccgtccgagtgaggtttaacattcttactgagtccgcttccctttcgaatcaatcagctgtacaaggtgagacaatctcgacaatgacgttggcagacaaggtattgactcggttgttccgctcagatcattgatggcaagaaagatatcgagaagtacaaaaacggtttcgtgaacctggcgctgcccttcgtcagcttctcggaacccatcgcgcctcccaaggtaaatattcaccgacccgagctccagtgcagccgagtcgcatactaacagcaagattctttttagttcgggcctcccgagaagaactggaccctctgggaccgttttgatgtacaagagggaactctgcaggagtttatcgaccacttcaaggctcaaggtctgaatgtatcgatggtttccagcggcgtcagcagtacgttcgaggagatctggtccgttttatgcatggcattgctaatgcatagttgccgacgatagtgctgtggtcatctttcaccgctcctcaaaaggtaaggctgaacacgatcgagctagcatcagtatatgacggtactgacgagtatcgtcccattactcaggccaaggaacgtttgccgatgacaatgtcagaggtgattgagagcgtgtcaaagaagcccattcctcctcatcagaaggctgtgatcgtcgaggtcagcagcatttgccacttttcgcgctgaaaggcatatcgactcaccctcattgttgctcagatcatggcggaagatgataacgaggaagatgtcgaggtcagcttagtgacttgtcgacatgcacattagtgactcgtgctgatacatccccctcatttctaccagaccccctacgttctggtacatctgaacaggaagtgatcgtgctggaactgtattgtgcttgttacatgaatgccccatgtagactaaaatcacgacaatgctttgtgctgtacaacgactatgatggccagtctcggactgcgtttcaacggtttctctcaactctgcggcacaggcttccgcctgaccccctttgcgacggtccctagcatcacattattgggcgagaatggctctggggatggtgccggcgggatgctctcctcgagcttctcagccacgccgtgcatattggaaagcggcagagaaagattcttgacgttcctcggccgtgtgtttgccgtggacggtgctggaggggggacgctcgagacatctagcgatgttcttgccgaagcatactccgagggagcctctatcgccgaatacgtcgatctgctgtcgatcactaaatcttctccgagccctaagcccagcccatctcgcgatgattgtcgctggtacatagcgaggttcggcatctgttcagaggcgctcctcaaccggtcgaccggcaagtctgatccgagactcgaccccgtcctgacgatcgcgcttgcactcccgtgtcgcggctgaacagacacatttgccggctcttcaagtcgaccagcttgatgaccgggtgcagcctccgccgacgatcgtctccatccgtccgacatggccgatcgaacacccgtaaacgagggcgactttagtgctccgatgatgccccttgtcttgcctaaagtcgagccgtccgatcccgtgtagcctttaggtgaagaacttgccccgcctgggctagcgttcggcaccgtacgagagaaatagttgcttgtcgctgagtccggcaggggcgggggtgtaggtgtttggcaagaatacgtcgtctcgggcgttttcggcatggggagacccgtctgcgaggtcatcgatggtgttctcgatttcttccctgtcgcgcctggaaatgtggcggctgagaaagaccgggcaagacgaccgcatcagacttcattcgtatgaaccacttggtcaatgaatcggactcacgcgtgtacacccctgatgtgctccgtttcttctccaccccgtccacaatcttgtacccatccttgaccacgccggtcttgtctttgttctctttttcgcgtttagattccagctcattctttcgttcttcttccctggccatccgagcattgacgtaccccgccgcattagccagcgagggggtcgtcgatcctctcgaggggttgttgtgggccgaggagaccgaatggatcgacgcggaggaggaagccggcagaacagggtaaggccgcttgaaaaacgaagtggaattcgaatttgaatgtatcgaactcgtcgccgtcatcccggatttcgataatccgtgcgggtaatgcacctctggggtcgagctcgggatcgagctcgatccacctgtgaggatcccatgaaagggagattcctgtggaggtgtgatcatcgggctagggaagacgctcgtccccgtgcccgtggtcatgctagacgcgtccatgtcactgctatcactccggctgactccggcctttgacgtcgaggtggacgtgggcatctggaaagcttgtccgagtccctgagcggggccgagggagtgatcaatgggcggttcaaagccatcagcgaggagcggactagagaagggggagactgtcgtcgatgtaggtggacgacggggctgtgcctgagacggtggttgccattgagacgatggttgaggctggggttgtcgattcggccgagactgagcagggatttcctcggatctcgaggtgctgcgctcggggatgaccaaagacgctgcagatggctttcgatgcttctctagcgatgacactggtattgatatagggaaagcattccgttggggtaccataggggtgttgtccaggttgatcgttgtgtcgttcagcatggaataccgctgaggttccgctggatcggggttgtccggtccgctgaacctttctggtagaggttgctctggagtacgggattgcactgtagatgctgatagcgcttgttttgtctgcggaaagctgttgcggctgtcctccggtccgtctgctgctggcagcatctgctgtgcagctagagtttccacattccgatgagctattgttgatgatggctcggtagaccccgacgttgcaatccgacccgcgatcttgccatcctgggtgacctctatcgacccttgactcgatctcccgacctgaacagtctcgaccgtctcggtcgagcctttcctgacgtcgatcgagtcgcttttatcggtccgtctcgttcctgccggacgtgaccttgctcgaggtgggatcgcaggcggggcgaggttcatgacgatcgtacgaaccctcccgaaccaagcttgctacgtagatcctgaccaagggataaggtgatcctcgtctatgatctaccgttgactatgagaacctgatgatgacctcgatgtgattgtcgaaagcagatatccttaaactcgatccttgtttgctgtttacgatgtcaacctcaaagagaagacgtacgctcggcggcgcccgatccaaagttgcctgttccggaaggtcggtctctgtcagactcaaaccgtgatggatgtggttccgacaagcacaaggaggcagataaatttgctgtcgactatcgctattctctgcagtccggtacctcccgggctgcttgcgggagaagtcgacgttggcagaccggtcgtctgttttggacggaaatggcacggtgttccgcgtagttcgtaacgagtaccttgacccagtcgcccgggtgcaccgccttaggatccgttggcgcgttcgtattcagagaatggatatcgcctgatcaggatatcgaaacgctgaaaattcaggcggcaaaaacgatcatgtcagggggctgaatcacatgtcctataaggaatgacaatgtccaactatccgctgagaatgcaatcgcgcaatgggaagcaagagcggagaaggaataataatattgatcacttgacctaaaagcatgaaacgcgcgcgcgatatcgacttcctttcggaaggcttacatgattgatagctcgccatcgtggctgtgaattgattgtatgtgtatatatagttgactagactcctgtggtcatctctcgaccccccctaatcttcctaggtattgggcacaaaaatcgttgaaggagtgggcagtccttatctgaatagcaaatgccgcgccctagagcttccagcgatccctcagactacggcccgggtcttagcctggctaccagagaatgtccaccttcaatgtcacaacaaaccgaaaacccgtcgactgttccgtcaaaggatgagcgcccagtcctggagtttgatgtaataatgcacgacaatagcgtttcggtgatcacgtggtatccggctgatgtctcgggttcctacgaagtgagcaagacggtttttcctcttattgctctggtttcatcgttgatttaaaatgacacctgccggcgcgtatctcaacaggagatagcgacagtcatccagagtaaattatctgctctgtcatccacctcactttccccgtctctgaggccattgatacatacagttgagatatatacgcagcatcgttacgcttcgaaagatgaagcagttcaagcggctttttcgaaactgcggctagcttcgttttttgtctataggaagacgattgtcgaaaacatcttatacgccttacgggaagcgggtgatttaccgtcggttctcaatttctgtctctgggtgtatgacaacatgaactgggccgagtgaaaattggccaagactctagagaagacaaacaaacccaagacgatgagtcaattgagagaagaattgcgacaagccgaacgtctagagacatatgaagaccttctccggtattgtgtcatgtgcgaattcaacagcccaaggctcgttgcggacgtatgcgggtcactgaagtctcgtgaagaatacaagaagcacaccttgagagggctcatctggcttgagaatgaagcccgcaaggagggcgaaccaagcgctttgccgagtgaagagaagtacaagggaaaagttctagcggaaatgctggcttggagtgacggccacgatcaggtcgatccagacttgattccatctgctgatccggtggattttgaagactccgactctgagattgaatggaaaacgagcctttgacttggatacgccgatatcctagaccaaacggatcactcgatacttctggaggagctacattcacatccgcctattgaatgccctcgtcttggaacgattgtaagtgggcgacttaacaatcggtccaaaatcagtctaaagagcctacgagcagatttcttcgagagcgaagtgactctgccatgtaagactctcgcttcagttgggctgacgaagagcgatctttcgggcacagtatcagtaggtagattgcatttcgtatcgtgatcctgctcataaaacccatgcgtttccccaattctactacgctgaatagactattcaagccactttccatgacattttatgggacctatcgatccgtgacggctttctgcgggaaaagtcagcctactacagcactctcgccgaagaattgagacctgaaggcgacaaagccaaagcggatacactagcagggccattctatgcgagtgtccttgggcttaggaaagcgctgttggatgtatcagatagcctgtttcagggtggtcaaacggtcaaggtcacgatcttcgccctatggctgtggggcaagctcgacgtactcgagaaaggctgcgctgaaaaacaagaacatgattgcccgcccaagacatattcgcagttgatagaggcacaccagactagagagaatttggaaatgagcgatatattgctgctctgctttctccgtgaactagatatcgaatccagagaagcgggaaaagcgatggacaccaatcaatccaagaggctcaaggacatgcaaacaaagggtaccagagcactcatctggcttgagcttgtcgccgcagatccagacagacagcttgaagcttacagaaccgcctctctcgtcgcgaattagcacatgttttttcctattgtaggagatgaagacatcggccctattgaaatgtgttgtcttgattcgttagcaaatggtcgcagatggcgattctttgcatagcctaaatggttcttgagccgtagagatggattgattgtcgaccaaggagagatagatagacacctagatattttggttcgacggcatgaagcgggtatactcgagtacaatttaacaatcttcaagaaccaaatgaggggaggtaatacttgcgttcacactcgccaaggccgtcccacgtccttgtcatgcgcacatccttgtacatcgctttgagtttcgagaagatgtagataaacgctgcaggtcttcaaagtatctgctgatatcgacccgttcgttgcttcagccgtgtggatggcatcttcatcacctgctctgggctgttccggctgttcggcagccgagcattctcggtcgcggtgtatatcgttattgacctcaagatttcgtacttgtacgctgtgttgatcgaaagtgacacgagtattcctatcgtttgatatcagtataaaacatcgtccgcaacatttgtccaaacaccgttgatgacgagacatgtcatcggatagcaacgaccgcaagccggctttaccaggaccgtggtcgaaaccaggagacgaagagatgtcgctcggttctatgcgaaaataggagtgcaaacactgctgagcaaagggtaaagcacgctcaggacgacatgtggcgttgtgaaccatagacgacttgcgagtattcatttgtcacgtagaccgaaacatctgcagtcctgtatagtcagcagcatagcgtttcgcgaaacacaaaccgggcagtctgcaaaacgaatctgccaatcggacgaagtccaaaacgggacgccgggtcttttacgatcgagcgatctccgcgcgcactgtagcatcgcgtaggtggagacgatcgcagccattctatatcctaaaaatcccgcgccttgacctagccaacaggtacaattatgagctgtatcctattgtccagcgcaccttccatagccgatgtgtaaaggcatcagccgagtaggcggcaatgtttaccacatgcactactcctgccagatatcacaacagggagtgcctgccgcggtatcgtgacgcgtagcaatcagtaaaaaatcatgatcgagcttaccataaatccattaatgcaatactaactttggatgcccctggcccagtcggactggcaggtccaatctcgcatagcgaaatgtctgtcagctccgttggaggaccctttgtactcgaaatgaccttggtcaagccacaggatacactgtgcccagtcgtcggcatcgaattccgcgcccttgcaatctgccctcactcgagtggcttagtgcagactgcagtgagatgcgtgagatgttgggcccaaactcactcggctgagcccaacacttgtcggtgcattctagtagcgtctttgcggaagtcgtgatgttggcaaccttgtcgccatcaaagtcagctattcagtcctgctctaaaccgagcctcacgagcacacatacccctgcgaatttcatctccccgtccgattcgaactcagtccgtcggccatcagcccattcaccgatagaatatatctaaaggctccgaaccctttctgggtagtggtttccgttgccgcgccgtcgcacgtatttgccttggagcctagagcaaagactaggcatatcagagtgacaacagaagcagagtgcatggtagagtccagcgagaactgtggtcgatccggtttgatgatttgcgtgcagtgaggagagtcattcccaaggggaaacaagacgtcagaaaatcgcgaatgagatttccctgcccggttctctatatactcactcatatggccggatgtcagtggggcacggaccatggtattcatggttcagcttctgccttgacctcgcaagcgtgctccctttgtaaaagttgtaaaagacggctccgccctttgtcttcacggccatccctttgtatagctcgataccgccaaagctgtgcaagaccccatgttacactcgcccctcatgcaagccatccttactgcccgctcgttcaagggggaaatctcttttgttgcactatcccctgtcgttactttacggctagctataagcactgtatcactttcacgtaacgtgccgccattgctgcaggctgtactctccgattgatggcccgaaccatcgcgaaaggtcgcagggggtttaactttatagcaatctgcatgaacgatacgaagtccggatgagcgtgtgttgaagatatttggctatacgtagccttctcatgcacagctgtacaacgggcaatcgttttctacatcgcagatgcgcgcgtcaggcgttgaagatcataggggcttggggcacgagctagcgaataaactagccattgatccatgttgaccggagaagccgcgaacgctggatgacgaagattacgaccatcttggatgtacgattcccttgcaatttgtaaagaaattcctccgaatcgcagtcaaaggcagtgttcaaaggtaatattcagcccgacgtgaaccatgtcatcaagacatgctgctcgttaggagaaatctacctaacgtgtcgcgaagcggatgtcagggatagacaaagccgccgcttcatatcgagtccatatcacagcacagagactgatgtgtgggttgaaatactagctgatcacgctactactaatcatactacatcaacagttaccacgaaaagctgaaagtactcgaacctcattgtcagggttctccgcgccaaacaatttgttaccatcgtcgcacactgcaagactaattgggtccagcctaaagaaccccctaaaagttctgccagatgttgcaacagggcaagcctaatttctctacaaggcacaagcgtgccagcgttagctcaagcgaactatgtttcaaaggggtctctgagctcaccagtcaattgcctgggatttttccagtcacaaccttggtttcgtatagcaatcatactataagggactccggctacgttcgcattggggcgctcgaaatacccttcacccataaacattgtgcaaagaccaccatatttctcgtatgtccaatttttaaggccacccgaatttccctggtcatattgaacgccatggcaaactactcgcggaagacccacacattgcttgtgcttaatgaacagatcgaccacgaccatattgacagatggacccactcttctcgctatcgaaaccgccgtcggccatcttgccgtctagttgccagcacaagtctgtgcaatccgtgtactttgtcgccatggatctctgcttcgaccggcaaagtccccaaaatccttctcctcagcgcgccgaaacctaaataaaccgatcatacgtgagcagtaacataccatgattccggtcccaacccagaaggctttggctctttcgatagcggcgtatcctcccattccaaagtccaccgaggacgctccgggacagccgtcggctttgacgaccagcgcacaaagtagagagacgagagaagtggtagcaatgatgatgcgcatgtttgatagtatgtcttgttgtagggtcgagtacgaggctcgattgtttctcaagccttcaacatattgagaatttggatgacgaccgtcagaaagacggtcttatacaatttgttcgccggggcacaaagacagcctgagccagtagatgtaacggcccctttgtgtgttccgttgttacgctttatgcctttcagtttcgaaatgatgtttgaggaagaaggttacaaatctatcacttggccactctttgttcgaggattcaatggagcgtcttgacggtacttacggttacgtgaatgaagcgttgaaggggctttcacacggtgtcgtccttcgtcatccattctggaggccttcgcatgcttatcgttggcgtgagaacccctggtgtgtttcaactcagccgactagtcacattcaccgaacggtctgtcgttcccacggcgaccgatttgaagatcgtttgtcaacccttggtggcagaatcaacgtgtaagagtacggggtgattagcccaatcgtaaatctttgcgctgatcagggatgttcattaccaagctcgtcttaccgccttcagagctacacgcattccccttcaaactcgctcgatttgaacacgccgtagctgtggcgatcagacctcaaacatgatgatggtgagcagtaggtcgagatggtgtcgcactccggccagctatcgcatctttcacgaaggcctggccacagtatgagacgtcgtctcggacgatgaataggttggtacaatgagcatatcgggcggtacatgaacgggccagcgagcgggaagataacgtcggtatcgacgacgaccgttcactatctagcggacgaggacgatcatttatgacccatccaaatactgcagcaaggccaagaaggattcgaatccgccgaacctgatccaccacccccattgaagaaaaaaaaacggtatgatcagcctccgaccctgactctctgtccagtttggggggaaagacctactagtgacgatcaactttttcacgtcgtaattctcacacgtatccggttgtttccaggcaaaagccatgaacccttgaccggcttcgggtaccctcaaattggtagggtttcccgtaaagtacagtttacacgcttggctgccatcattttctttgtagacgacacccttgcagtctgtgtttgcgtgtccgacgactacttagaggcgggaaactcggagagtggaggtataaggaagggcgtaccgggcttgtcccagcacctatcagtgcattcgagcagggtcgctgcgggtcccatctccgccggctgtagaaacagaacgagacacgacatgagtcaatccccactgaatcgatctacgcaatcggatctgagaaattcaccttgggttccccaaactcttcttcttcccaggaagtcaagacgttctcgaaccctgcgaatcctttagaatccggcgtgatggacgcgtgggaacaggcgttggcgtgcactctggcgatggtggtcgccagggagacgaggagggcggtcttccagtgcatggtcggtcgttgtcgtcgtcgtcgtcgttgggtgtttgtcggtcggtgctgtagtgagatcgtaagtgttggcgatggtcattatctgttggaaccatgtctggttggatgagccggatccggtcgaacattatctttctatatttgcagcctgaatgatcttagcgaggccgtaccttgccctgccaagacgaaacccccagctcccctttgtctccgtgtgaaacacgtttcttgccggcgtttcggaccgacgtcaaggagccaaaggatctcggctccctgagtgctaaaaggaggaagagttggacgatcatcgagccattcccccccttgttttcaggtcgtatgtcgtacttggcctaccgctccacaccgttcatcaggggagatgatcaatcagaatcagggggagatctcccagggggggcaacatcctgttgatcttctcggtagaatgtgatgtcacgggtttggctctttgtcgtgtggttcaggttcgcgtttcagcttgacgatacattatcagtcgccacttgactatccgcggattgcaaagtggtagtgtgtagtgtccccgtgatagatacacgtcgcccccctgccctctctccaccaattcaattaaactcgcgccgcgttcaaacgcgttctcgcgatgacaactcgaagtgagagggggggttgttgacaaaacatgcacatacaacatccatcatcatcattatcatcacacttttcacaccgccatcatccccggacgacatcacacatctcgtagacactaccaacactcgtctccccgggtaaacatggcagacctcctcacccagacgcaggaccccatgccggtcttgcaggatgacctcctcaaagatcgaatccgacagttcacagagttcttggacgacgaggcgagtctcaccatggtccctcttttcgctctcctccgcactgtcatctcccgggctatcagcgtgatactaatccgggtacgttgtttcctcacgatcagagtcaggcagggtataattataggcatgcgaccaagacgatgttagataacaatcaaaacaggctcatcgtcaacctcgacgatctcagggattacgatcgaaccatggccgatgggtacgtttatccccatcccggtcgtccgcaatatgttgcgtacaaatgggatgcgagcctgaactactctcgtcctcttctttttgcttaccatacccgatgccgtcatcctcgacatcaaaaacaacaacatcaacatcttcaacaccaacaccgacgtacccaccaccccctcagacttctcttacaacccatgcaatacatcccagctatcgacggagcgttgacacagctcgtgaccagcttgcacgatccggtcaaacatgatatattagggaaagaatgtgggtcgtcgtcgtcgtcgtcgttggggtcgagcttggttttctttcgggggagaagacaggttggctgatttgagttttttgccatgttcctgctttgctttttcatcttcttcttcttctgtctctttctctttgtcttcatcctcctctttctcgctcctcgtctttcccgctcccacccacagttcacgtcggcctaagaggctcgttcgggcaacaacactgtaacccccggacactgaggagtcatcagatcggcaagatggtcagcctggaagggatcgtcacgaggtgtaagtgcggattcgaggggaggttccggttgggttgctcgcgaaacagttctgattcaccacctgctcgccttgctcacaggctcgctcgtccgacccaagatgctcaaatccatccactactgccaatccacctcgcatttccactcgcggacgtaccacgattcgagtaccatctctgcccagacgctcttcaccgccgcaccttcgacgacggtcgtgccccaggacgatggcgagggtcatgccatctcgatggaatacgggttgagcacgtttagggatcatcagacgatcagtattcaggagatgccggaacgtgcgccagcggggcagttgccgcgcggggtagaggtcgtactggccgatgatctcgtagacgggtgcaagccaggggataggatccagttggtcggagtgtacaagagtgccggtggaggccaaggtcaacgtgggttccagtgagtcgagacggggctcgtacgtgtgtgtgtttcgcactgggacatagtcgttgatgcccgacggggaacgctttcgtagcacttcgttgatcgccaacaatgtcatcctcctctcttccaaagccgggggcggcatcgcccagtcgacgctcaccgacacggacattcgaaacatcaacaagctctcgaaacgtcgcaacgtctttcaactcctctcccaatccctcgccccttcgatctacggctcggattacgtcaaatccgccatcctgctcctcctcttgggtggagaagagaagaatttggccaacgggacccatatcaggggagatatcaatatcctcatggtcggggatcctagtacggcaaagagtcagatgctaaggttcgtgctcaatacggcacccttggccatcgccaccacgggtagagggagttccggcgtcggtctgacggcggccgtgacgagcgacaaggatacaggtgggtctcggcgtgacgattctcggcttgtgcgtcagtgtcgagatgccgaaaggggctgacgatcgtcgcgggatgggttacaggcgaacgacgtctcgaagcgggcgccatggtcctagccgaccggggcgtggtgtgtatcgacgagtttgacaagatgtctgatatagatcgggtcgccattcacgaagtcatggaacaacagacggtcaccatcgccaaggccgggattcatacgagtttgaacgcgaggtgtagcgtcgtcgccgcggccaacccgatttacgggcaggtgagtcgagtcgtcttgatcgcgggatgtgcaaatgtgcatgtggctgatcataagatggggtccgccgcagtacgacgtgcacaaagacccgcataggaacattgcactcccggattcgctgctgtcccgtttcgatctcttgttcgtcatcaccgacgataccgatgagcagagggacagagccatctcggagcacgtcttgaggatgcatcgatatctccagcctggggtcgaagagggtgcgacgtcggtggttcagttgtctaggctcaaatcggaagctgactttttcgcgctaaaggaacccccgccgtcgagaatctcgtccagcatctcgatgtcggtggagacgaacaagacgctcgaacgctcgagacgcccgtctttgaaaagttcaatccgctcctgcacggtggagtgacgacgtcgtcgggccgatcgaccggcaagaagaaggaggtcttgtcgatcgcgtttgtgaaaaagtacattcagtatgccaagaacaggatccacccagtcttgacaaagggagcagcggattacattgtcggcgtgtatgccgccttgcgaaatgacgatctcgctagcaaccaaaagagggtgagcactggtcgccgaatcctgcagaacgcgacgatctcagctgctgactcgatcaccccttacagacctcgcccctcacggcgcgtactttggagaccttgatccgtctctccacggcccacgccaagtcccgattatcagccaaggtcgatgagcgagacgccatggccgccgaagagattctccggttcgccctcttcaaagaggttctcaagcccgagaggcgcaagaagcgaaagcttaatacgggtaaatccaagcgatccgacgggagcgggagtgatgactcggacgacgaagacgagattgatggtgggcttgtcgatggcgagggcgaggacgacgatgatgacgttgtcaacggacggaccgaaactcgagacgagagagtcgctgcgagatcaaggaggatggttacgccgagggagagtgtgcccaggagcgcgcaagaaggcgacatggacgtcgaggccgaggaagctatgcgggacatggagcaaaacggaggtgacgggcctgcctcgagtcggccagctcgcgggccggatacgattgagtcagagaggtgagccaagtgactctccaagcccaagtggcaggtgctaatatccgcatgccggtcctgcaggctggacctcttccgagaacgcttgtcggcggtctttggaaaataccctgatgaagactttttgccctttgatcaactcttgccggacgtcaatgaggggttgaccaccacgatcatgtttggtcaagccgaagctcgtctcgccatcaccaagatgagcgagctgaacgaggtcatggaagcagacggtgcgatctacaaagtctgatgcgcgcttgctgcgatgggggggctatagcttgtactttttaatgcatacgaaagttgtacaacgggaacaaggatacatgtggctgatccttcagcgtatgcgtgcatggcgatgcactcaagctcgtgacgtcgaaatcggtccatatgggccggctatacgtcttgaaaatcgtggtatgttgtgatctgaatggtgatgtcggcattaaagtgctgtatttcgattcagttgtcaaggcgtcatggtgcggaaacgatggcggcctgcgtgatcaaccgtctatgcagcaatctagactgctatcggattgtctgacatcgtcccagattctgctggcttgactggatccggaacgcctgaaattgattcaaccggttgagctggcgtaatctcgacaacggccatcgagaatctcggggggactagaggcgccgtcccgtgctccttcagccatatttccacgtcattgggtacggcctgttctccggcaggtggccgcgtgctcggtggcacgcagagggttgacaaagtattattgtacgcgccatgagctctctgttcacggaagcgcttcatgaaggcggtagtttgaacggattttgcggtacccacgggctgcagcccgtacgaatgcgcataccgccgcttggcagcgacctgctcggtccagaaggtcggtacgctgtcgaccttgcctgaacaaccgcgtcttacctgaaaatcagagatggtcttcaaagtacccatgagatccagtgtgcctcgcgtctggggatcacagaatgtcaggagtcgatccgacaggcgctgcaataggcgctctagcagctcaccactggtacgaccggagcggctggtttggcttggcccctatctattctaccgctatagcgatcccgcctacagaagaagcctgcggtaagctgaagttcaagagcacttcacgacgtatcccgacttacggtagatgggatttctacaaagcgggtcgcgagcgaccgttagcttgactcctactgtcggcgacttgaaccaaaactcacgatgcccaacatgctcgcataagcagaacttgcacctgtgagactcgccgatagcaattctgacactttgtcaccaacgggagccttattcttgcccatcggtgtatttttacccgaggtgttgctgacgggcctagcaggcttgcgggtaactggagtagcatcaccgctttgtgaaggggtatcgggcttcgttcgtttcgggtcaagggcacgttgagcaagagccgagtgctgcttgtccttctgcctcgtcgagtcttcctccggtctgccatctgggctagcttccgagccactgagacgtctccgcttacgcgccggatcggccttctcctcgtctcttgcttctctttggatgctcctatctacatcctctccttcggcacgcctgtttttatgaggcctatcgagctcgtcgcgagataccttttcgcctgcctccccatcggctcgtcgagacttgccgccgttttcgcgatcctcccgtttgacctttctcgatcggtctggttcatcgcgatctgccctttccacgtgatgcgtctcatcccgtcttgctttcttgtgatcgggggactcgtctttgtgaacgggtttcgattgatctccttcgcgctctaatcgctgcttgggtcgtggccgtccttcatcgtcatgacgcgaatgctttcgaatcgaagaatcgtcctgtcgatccccgttcctcggtgtgggacgctcgtcatcgtctttgggacgcttccttggggtctcgttggcatcgtcgactctgtgtttcttctccttccttcctacatcctctgcggcccgcttcctgctcgactcggcgggcgattcgcgcggctcgtcatctgaatcttctgattcgacgacggcacgcttctttttcagcggtccagggacagtggcgatgtttgtaccagaaagcgccctatccggatccctgtgtttaggtacagatgcacccgtagggggcggggttcgacgtttcgatgtcgtgggctcgtcgcgatactccttcttcagcggctgtctcctctgagcttccggagagcttagagagctaagttccgaagaaggaggagggctgtgttgtctcctttgagtatgcgcgtccctcttgacgtccctgtccggccgttttgagcggtcgccttctggtcgagatcgtttgctctgacgggtgagagggtcatcgttgaaaaagttgaagtcattccgtttagatttgtcgtccttatctcggtcgatacgagacggtccaggtctggcttcttccctgtgtcggccggcacctaattcccttaacccgggcctgaactcggcgtccagcacttccttctttgaagctcgggcgctctgctttgcaggacggtcgtcatcaacatcgtccgaatccgtctctcccttggctgccaagcttttctttgtgttcctcttttgcttcagtatgggattgccagaccgggtcgcttctaggagtttccgtgcatcgttgacgttcctcgtggtgctcttaggtgcgggccagacgcatggtacgccgttcgcttcgcatggtgcacaaggaagaccagagtaagagggcgaaggacagacattcttgatgactgtcttacacctgcaagatgaaggcggtgagggtcaaacagtcgagaaagtcatctgcgatccgctgcgtacctttcgcaattgagcgtgtacttttccgggaaaaagttgtcctcgtcgacagcccgctcgacgggcatattgtacagtctacaggccgtcgatctgaagtctcactttgccgatcctgtaggactatagagctgatttactgacagactgcaatggtttcaagtacgactcgttgaagatattcaacaacagccccgagtggggttgactggagttgatatccctgagatggttcccttcaagtctcagctcagtctcgaccttcgctctattccgacaattccgttccatccacaaccacttgcatacaacccgaatcagatagattacctctacgttcagtttgcatcgtgcagtgtcaagtatttacgtcaagattctacactagccaacggaacaccatctacacaatgtctggtcctgcttcttccgccgccggcgctcgagtatcgagcaaattcgcctgtaagtcgagttcccgaaggtccacccctccattcgactagattgttttcgagtagctaaagaaatcgcttgctattgctatacattgtgacccgctgtcatgccaacctgaatgcgacgactaaactaaacttcgcaactggctcttccctgcgtagcgttcatgaaccaccccgcgggtgagtcttgtcttcactttaccctaaagctacgctcgatgatctgatactttcctcatcatttctcaaacaggtccgaagtacgtctaacccagattcagcgtcgacgtagacgacactttctgaacatcctaatcatatttcgcttaggaccatcttcttctgggcacctctcggtacgtatcgcgcctgcgaccggaccgcaatcgtttactcacctgacccaccctaactcgctcatgaatccacagccaaatgggccctggtagcggccggtatcaaggacctctcccgacccgctgacaagctctccgtgccccaaaacttggccctagctgcgaccgggttcatctgggtcaggtattccttggtcatcacgcccgtcaattacagtctggccgcggtgagtcacgtctcccgagctggatggcaagcggtagagaggtgtgatccgacggctgactcgtgtgacgactgtattgttcgcaggtcaacttcttcgtcggatctaccggtcttgggcagctgtacaggatctgggagtgagtgttcccgttcccttgtcgtccgctgactttctgtccgcgactcaagccatgcgcgccagaattacttacctacctgcgacccgtcagccaccgaaagtcgcaccccatcgagaccgccatcaaggacaagaccgctaccgcctagacctcttcctcttgttaccaaacatctcttacatccccgttcggtgccctggatggacctatagtcgagcgggccgaggaaatgccaagcagtcgtcgcgtcatcgtcgtcgttgtcgtttgtctcccatcctcgcccctattttgtgcttgtatcgattcggaagatcatctcatttttgtgttcagcaagtcgtctctgttcagtcggtggagagatagtcgtgttcgcaccagggtgtccattctcgtgccaatcgtccttcgattcagctctgagtatcccggtcctgtggaggagctggtcgcttggtatccccatgaactgtctcttcaaggaactctgttggaactgatggccttcgagaaagatttgcgggaggttgcaacgccggaaaggcgaatcctgctcactgtacttgatgagtactgcttagacaaccaagtcttacgcttttcaccagccttgcaatcttggatgtcgccagagccgggaccatcaagatgatttccaggatgtttgcggtcgagaaggatgtcgtttggagtgaagggagtgcattggaagactcagctgcctttgtctgtttcatgaaaaggtggaagcagtatgtcgcacgacgtcatgttaaggagataacctccacggacatcaaggactacggtttgacaaatgttgagacatgaaccactgcatagacatcaaataaacgatgtcggagcattcccctcaatagcgacagccagctctttggccgtctacccttctcatctatggaaaaagatgacaaagtcgaccacccgccacggcttagtgatagtgctcaagtgccagctgtggctcttccgcatgtataaagtctgggtgtttattctcaagttactctctccacttcgtcttgcaccccgggcagaagggtggtgaccggaaggtgagtgataagttgggttagatagagaagtgaattctaacctagaagagaggagaaggaggatacggcgctatatcctcaatgaggtttatatggagtccagatctgggtgaacagatgccatggtgattgtgtaccactcagatgtgtggggacctccagctttgtacaagctcggctgcaacagcatggtcgttttctggccgattcgaatcttgtcgaacgtcacgactcaatcgctagacgctaagcatcggtaacgatttatagcgcctatccccatacctgtgcgcaagggagtcatggtatggggtgtatatctactagacctacaaggtcaatctattggcattacaattcatgctgatcatgtcgctcaggtcgagacgaaccttgctggtacttgtcacgacccagctgtcccattcatcatccaatcgacgactcctcctagttcccggccagccgagtcctccatccatccgccgaagaccaatgataaggcttgtcccgcatgattccagtcctgctgcagagtcgcatcgtcaggttgctgatatgtactgtcatcgatttgcatctcgtcgggatccatccgtgaagcgtctgtcaaccccggtctcagatgggcgcggctagcctgagcatacaaatcccagaatccctgcagccaccaaatcgcctccctgatccgcaacgagagttcaggtggacacatcatgctgaccccttcccaacccttgtcgagcaagtgcaagcaatgacgggtatcccagaatcccggtccaggatcctctgccgtgaggaacgctcttagccggacggggtcgtcgttgaaaagcttgctcaacaggaaagagtagagctgaagaggcaagatctgagacagtctcaaatctatattgcgaatggtcgggtggggtttcttctgtatatgtacggctttggctttcttcctgatttttcgagcttgagcacactctttgctcgacagctgtgcgactctgtttggttgaacggaatcagccgtatgttcctccaacatatgagcttcgttgtcgagcgggagtccgtcgattacggacgtcgccagagaagggccgaccagtcgttctgcattcagtctttgcttgacttcgttgaggattaccttcgccgacactattgggtgaccaacggttggtacatcatgcacttcggcctatgagacgttgtccgtaagcgatcatcggtacatccctgtgcaaagaatacagctcacctgcaacctcagattacgatcgttcgtccacaagaccaccctagacccaccctgaaacgcagacgaaaagtatctgcagcaatcgagaatttgcgtgtctgctttcttgggctttgattcaaaaatgggttcattggccgggttcgagcaggtaatcgtgtgataggcagtcacccaccgaacttaggatccctatgcccatcttctcatctcgcttctgaaaccttatcgacctcaagcactgtcctcttgaacaggctgatttctgcttttcttccttcgcctgtcgctgttcatccgctcgcaatacctctagcagccaggtaacagcatctcttgcagaggatctgaggtcgccctggccagttttatggttctttcgtttcttctctgggttatgtatcgacaaatccaaagatccattggagtcttgagccagatgatcgggtttaaggtgcgtctgcctcacttcggtagaggtcaaagctgatttgacggatgtcggaggtaccggtcgagatgaacctttcagcttgaatctgtccagttctgtgatctcgtagaggatcgcatgatataagggatccttagcagccataagacttttgcatgtcacaagtcgcaatgctcaccatctagcaccacgcagggcagaagcaagcacacatcagattgatcatcaatatctcgttgtgcagcgacaccgtttgaggctttgcgtttggctttggctgtcgacacctctcgtagtctcaggtagactttcttgaccaattccagatgcgatatcaggacattggtatctatcgcaatgtagatgtaacgatgacaggggaatattgaagtttggatctcaacgccttggcttgatcccgctgtttctggccattcagccattggcacgtccacactcagcgacatggcgtcgcatcgggtgataccggtagaaatgacccggcctctttgcctggctaggtgagtagtgtcgcgcaaactgtgaggcattgatgaataaagacaagtagcaagtagcatatcttgacgcagatggtaatcgatatgctcaagccggaaccaaatctgcttcctgcggcaggaatattgttccgcccagcgctctattaccgatgagaaattggttggcaaacgagatctgtccttaggctcataagaatctcggtaatgatacagaatgatatgagatccgcaactatagtactgtagcacagtccgcacgtgtatcacagcttataaagcgatcaaggcagtcatggaaccgtacaccaccctctcattcgtcctcctcctcgtcgtctccgtacggattaccccaaggcgccagattgttgcctgcaggcatggcagatgcgctccgttgaagatttgtcggtctcccgctcccattggccttttccaatggtaccgagcttgtcaggtcggaacgatgcgctgcaagcgcgtactgatacggctccattcttggtaccccggtataggtagcagagctggtgaaagtcttgtaaccgccagggcctgatttgttcctagacaaggctcccttggttgaagtcgcacgagatttctttctcgaagtcttggttgaatagcctgcagggtcggtaatcccaggcggaaggccggaaaccgatgacactgtgtggatagcgagtgttatggcgtgaggagactacttcagtaacaaagcgactcacctcgtcttgcatcattttcttgaccgtaagatggatacatcgcatggcctccgcttgtatagccggcgggagtgtgcgctatgaaagaggccctcaactggctggcggcaatggtgttcaacgactcggtgaccatcttgcttgaggccttgcctttcgatttcgacttcttggccacagtagcggcgagcgaagctgatcgcatctccacctctccaatgggccttgtacgcttgtgagatcgctcatatatgccgcatcctgtataccatgcggaaggtcagccaccgtaggatatcccgaaggtgaagtgcagcgaaagccggaaacttacggttgcaaagctagcatcatcgcgagagacacgcgcgattaacatcattggcatccctatatgtgtggcggtgaagaactgcattagacttacgatccgtttcggagcgagagtactcttcctccagctcggtggatctcggcatccacaagtaaagcactctcgcttgagctatttataccgacattgttaagcttcatggaaatttgaccggtagcctagttcgactcaccgtatcggtctgcttctcctcggccatggacgtaaatcgaacgagattgttctcgactggcatcagtggtggtaacttgatgataaccttgttgctcttgtccagcggagtctgtacagtaggcgaagatatgacacgctttcgagatgtcttcctggctggcgaagtcttcgcagaagatttgcctcccttgcccttctttctcttcgatgcgcctttcggagttgcggccttcttcttcttcttgaaactctgagggatccattcctcttcggcagaatcgaccgatggcagctgtggttcggactcgggctcgctcagcggatcatcgagcttttctgtctcgccaatctcttccgcttgttccgcttcgtcgatgtgggctccatgaacacttggcgtaggtgcatccatgtccatgtcttcgcctggcgcgtattgatatgcgaagacgttgtgatgagcgccatgcggctgagcgtggcccggatcgacttcgccctcggtaggaggctcctctccatcttgaccgggaggcgccatcgctgcgccattttgaaacgcgtgaggcgggttggaaatgaattcttgcactggcatcccttgttgcacgtagactggcacgccggtggccggcccagtataagagtattccggattaccattcgcgtcccatccgatcagagcggtaccaggtgggtgtgaatagaagtgcaccggcggctgcagaccgttcgatgagtagtgctgcatccccgcggtttgggggaaaggaaggtgacgagtctgcatcggctgtaacctctgctgagggggcacttgataactctgagagtgtccttgccgctgcatgtgaagatgttgttgctgttgcatagacatctgatgccctgcgcttgcggatctgccattgggaacgttcgtctccacgtagagctggttgaagcccggaagcgagacttggccaccgtgaccctcgctcggattagcgataggaatgagaccctgatgagacatctctgacgacctaggtgctactgcgacgtagctcgggccataagtccagtaggtcggagccgactgggtaggcgaaacaacgtgctggacgtggtaagaaggcgcgcgagtgtgaggctgtccggtttcgtggaaagacatcgaggactttcgcgacgaatgagtcgctgcgccggtcgattggctggtaaaagatcttcggtaagaatgggcactaggaaacccttccccgataggtgtgccgttggcgctttcgtacacctgcagaggagccgagccgttctccatgacaggaagcggtccaaagacggattcatcctgcacaatcgtcttgagtgccggcagagattggttctgctcgagctggtccggctgagtctggatttcgggcatctggatgcccgcgctctcgaacgtgtggcgactcggggtcggggtcattccaatgtatccagctccgcctacaaaagggtcggcagaagccctgagttgcacgggtttggccatgctttcgccctggtgttgaccggcaggcgcaaggccatagctggcgtcggaagtggcatagacgtatgagccttcgggagcgagtggaggtggaggagctcgccgggtactattggcgctcatcggtcgaggtgtggatctcccatcgggcgttgcgagggtcgccatcgcaggtgcttgagtatcttctgcgtttcggttaggagatgaaacctcgtgcgagagattccaactaagtctggcaccggatctgtcggtagtggtcgggctggcaggaaagtgaatgtgaaacgcgaccgaacggttgttgtggatgactgcgggaaactgtcccgttggcgatttcgttagcggggacaacgaatgggcgtggtctcggtaggatggagtagcgccagaattggcacttgggcgaggttcgagatcgtggtggaacggataaataccgagacctgggcatgcgagcacaagacgacagtttcagtcatattggttggccacaatgcgagatatgctacgattctgaaatttggccaggccgctcacctttcaaatttgcctgcgtggggaaacgataaaaatcgatcgacagttctcttccggaacgaggttgatcgtgttgatcaggtcgatcgataagatgttggtcgacgtcctttgaaaacgtgtccgttccttgatcaaatggagatttcaaagatacgggtgtagtgatgatgggcgaaggatcacttagaggtgatgagtgctgtgattccgggctgtgcagatattcgcgggcgaggtcctcggggctagggacgttactgtcgatactgagtcgttgcgattgatgataatggtatggagattgttgatctagatcagcttgctggcgaggtgagaaagtcgacgtatcgatgggtttgatttgcagaggagacgatggtaggtctctgctgtgatgttgtggtgcgagctgatgatccggagtatccaagatcgatcgctttgtagaggatgctgatggtgggtggtcttgttggtgatgctgcatgatggtgatgatgaacgatggtcgtttctttatgaggaaggcgcgttatgatcaagggggtggtaaggcctgagcagctaaacggcgagacgtgtcgtcgagaggatgagagaaaaacaaacagacgggagtgatggtgaggatgaatgcgtatgagaggtagaacggggtagaagatggaaaatcttactcgatcgtggcaatcggctcgtcactggtatataacgacagggaagagctcgggccgtggcaacggacgatagcgatagcaacgactgatcagtttcgagggtcgtcaccgagatccaatcagaaggccgctcgtcggtggtggagccgtcgttctacgtgcaggggaaagagagagagagagagaggtcgtcgagtatcctagtgacttgatctgtagatatgtggaatgaggacgagttcgacgaggcgcgcgggaacaaatccgagatccccgaggcgttccggttcgagggtgacgagcgtaatgaaggcagatgggtggatccggcggatgatcgagccgaagcgaaatgtgcatcagctatatgtacttggttggcagaattggcagggagggaaacgggccttacagggtatgtctgtctggatgtggtatgcaaggcctacgggaggggtcaagcatgatgatcagcagcggaatagttgacagtcattgcaatggcgtacgatggtgcgtcgagactagcgcgtgggtcgtcgtcgaaggtcctttgtgatacgccccgcagcccgatcaggtaaagaagatgatgagacatcgccgatcactttactttgatcatcacaaatcgatagaatctcgctcaccttggaatttctatggagcttgatcgcgcaagatcgaaaggaggggagtcgtgtgctagttggcgtaaggaaggtcgtggacgagctgatcagatgcagatgttacagatcgtcgtgtcggtcgtagcgaagttgtcgtatcgactggcaggggaaaatctttttgatcaatccttcctttcgatcagcgttatatcggggcgaaactcgttccctctcggctccctcagtcgtttggcgaaaccgaccccttgatcgtgacgactttttcttggtgtttccatcaccgcgtgcgtgatgccgcccgtcatccctcgcgtgctacatcgatgatagaagctcctcgatcaaggggtgggatctaatcggctgaaacgcgtttcgtgaccacgagggggtcctttggctcgagtgccaagatcgcccgaggagctgcatgtcgttcggcacggatgacgccacttcggtcatctcttttctctaacctgtccacgagaggaaagggctatgatttctgctatgctccccatgccgggcgtgagggacaaaggacatatcatccacacccttttggtcctcccggccttatctgctgtattactgtgccatgaggctacaaaagacatcgctcgcaaggcggtgcagagagggaggtctatcctttttgttcccgacctttggtttcatgacgcggaatgtctcttttgttcatcgcgcttcgtaatggaaccgcgcttcttcttgacgcgcgcggtcaggttgaaaccacaagcgtgtgcgttcttgaagatcaagtgcaatgcttcagcagatggaccgtgatgcattgatgttactcctacggccgcttggtagtattctgccacccattagcagcactcgaccttaggccagcagcaatgttggcctaacgatcgagatggtaggtggttcaccttgtcaaccgcatctcacgttcttaactctttgcggcagggtgtatcttgccaagtgggactaggtgacagccccatggtagcctgtaacagaactatcatgcagcagattggtgcaaggttgagaattcccgagcaaccgcaaacatgtgcgatttcgatcttggagggctcgtccagcgttggttcgaagtcgctggatgtactcttgatgtctcttgatagagttccagcgagctggaatcatggctacggcacttgaagccttttccatcccagggaacatgctgcatactgctgacaggcaaacatatgaaggggctccaacaccgcaagatgcatgagcatcaaatctcgtttcaaagactcatggtgattcgccccgatcgcaagtcctgcaacgattcgagcacctccgatggtaatggtcaacgtcgggacgaagaggtcccacagggaagaaaaaactatacagtctctccggcagagtgagtttccccgatcgtacggaggtccggtctttggccagccaccttgcggggaccgcgcagtaaaccacatagtgaactgccgaatcggcggcggatctttcactattgcatctccacagggccgtcgtcctgatggaaagtaaacgctacacgatcgcgcctgtctgatgttcatgaacgcccacgccgaggctcgatgcaaatcggatcaaatccgtcctcccgctgacccgtcgtcgtttggctcgcgattccttcttgagcgcatgtcttgcgtcaatcagtccagtcccatgcgtggagggtgtccagttcaatatcgtatgtatcggacaactcgcctgcctaccgagcctacaatctcctcccgacttcaatcccccatctgccccgttccctctcgatcgcctctttcccccgcatcccgacccccttgttccccctaacccctaacccctaacccctaacccctaacccctaacccctaacccctaacatcggccgagcggaaggacttgtgcacgcctttcatggtagcagctagatagatacattatgggaatagacatccggcatgatacagtatttcaaacagagctgacttctcctgatcagatcgtcgcctgagccttcttgttgtgaaccggtgcgacaccggcggcagtcctctgcgagtcgctcgaatcgacgcgttgtcggttctcgccgtgttcgagcatggtggtctcgcccttgcttttctcgtccatgatagcctcctttcgggatgcatagggctgcaaggtttcgaacgagctgctcagccccggcaggcagattcgaacgccatcgcctgactcacctcgggggcccacttgcccgattgccacggcttgagaccgggttcgctgtacatggcgtcgatcatctccaacgagattgccgaactctcgtacaggaaaaagtaggtgaagatggcggcagcaaggttgcaaccggcaaagacgaaaccgtaggcgtattggatctcgttcgtgatgaagggtgtgaagaaagcctgtagacgggtgggcacatcaatacgggaccggattgaagcaagaataagaggtacacacaatcaaaaaattccacagccaattactggccgttcctagtgcagcttgtcgcgatcgctgtccggaggaggtcatgtcaattcgcatgaaaagtcgcccaggtctttgaggcgactactcacgttcttgcgtgtaccggtctctccgacgaggatccagataccgggtgcccacgtgctcgcgtacgaaaagatgaagagggcggccgagacgatcatcaaggtcccccacttcttctcctcgggatcggcaccgacaccgacaccggcaaagacgaacagccagatcgattgccagataccgccaatgatcagaggccatcgtcgagagaatcgtcccatgacccaaataccgaagaactagaagtcgagaattggccgtcagcggcagtgcaaggaactcgtaccgaaggcttgtacttacggtgcagacgaactaaagggcggtcggaaataggatggtcgcatgtcagcatatgcatctgtcggagtgacgaacgagagacacccacgttgatgcctcccaactacgagagggggactgacgtatcagcaaacttgaagcctcgccgaccgcgccgcgatgatggactcacgattagctgagtgacaaacgagtcctcgattccgaccgactggaagatggtagctccgtagtagaaaaagtactacaatccaggcgcaaggtcagcgtggatgcgatgctactcgtctcgttgatcatcagacccacgttggcaccggtcaactgctggaaagccatcatgacgacaacgatcatcgtcctgtaaggcgccttgttatgaacgtccttgccttcgccgacgaaacactgggcccagcttccacttccggctcgcttgtccaattcgtgtgccgcccactgttcgtcaaagtcagaattgacgagcggatggttctcgtcgaggcctcggatcctagccatgccgcgtctggcctcttcggttcgacccttttcgatgagccatcgtggagattcaggaacaaagaagatgcccacgcccaagatcaagcaaaagacgagaccgagagcgataacgatacgccaagaacccgagttgtcgaggtttcttgtaccgatcgaaaaggcgtatgccaaaaggactgtgacgggttcatgtcaggtgaatttttcacatagcgtccacactgctcgccgactgcactcacttcccaacgtgatggccagttgataagtcgaggtgcatgctccacggacctgcttgggcacgctctctgcttggtagacgggaacagcggcggacaatccaccgacaccccagcccgagacgaaacgacccatcatgatctgtacccacgactcgaatgcggtgactgcaaagaaggaatagacgatgatgagcaacatggatcagagaccgtctaagaccaagacaacccgacccactttgaatcactacgccgacggaaaacatgacgcaaaaaatggcaatagcctttctcctgcccaaatagtcgctaaagtatctgccgacgagcgctccgaaaagggttccgatggacaacagtgcgacgacgagaccttcgcggacgacggtgaattctttttccccggcagcattggtctgcgcgaatcggttgaggaagtcttccatgaggaggatgtcggcgatctgaccggtgtcatagctgatgattgcgagacgcttgttagcccggccatcgttgcgcggaagaacagtttgctgcccagactcgcccaaagaggagacctcccatcgacgacaacaaggtcaggacgatggtggtggaaccgatggtctacagtggcgttgttaagaacgggaggaatcgtcaacgcgcggacgagaaccgattcgacacgaatgctgacgtacggttcccctgacgtgcatgatgagacgtcggcctgtctatgtcgtggtttgtggtgcctttagtaagccggtcgagatgggtcctattgtcttgccttagggacagttgtatagcgaagagactctcaagactctggcaagagtttggactcggtctgacctcgccttaccttatatgaaaccagctgaggtgcttcggttgagcggacaacatcatcccgtgacgtattccccgtcccgtttcttttctgccccgctcgcgcccctctgtgggccgcggaggactgacgtcggtaccgctcacttccccaagggcagagggcgccgaacgaacgaacgaacgaacgacatcatcgtctttcactttcgcccgtcacatgtgatttcgcaaaagaccgaggatgacgtcgaggccggaagagttgaacagattggttctttgcggattccacaaaccttcggcgagatgacgtcgtgaccccgcactggtggggcagaagcagcgagaggtggagtgaggggaagacgtaatgtctcggacgcgtggcttagcgccgagattgcctcgaaataactccaccccacatttaatctctgctccacccttttatgcggctcccggtgaggccattgtgattctgatcggcaatcaaaaacatcacgatgaacaccagatccaccacaatggcgcacctctactcgtttcacctcagatcgagctggcttgccggcggccgcagcccggggcattcgtatgggaacctcgttgggcaaggcgacggcctgacacgatcggccctgattcctcctcattgccttcgcagctcaaacgttgttcggatcgaggaccgtcgagtacaaatcgtttccgcgggtactcggtcacgaggcatcgacacaagtggaggtccggttaccaagatgcggcgcacttggagcggacatgccagtatttcatgtccgctgttgaagcagaacagcaccatctgaggctcggtagacctcggaccgtaacactgaaatctgttgttgttgcgaaggctgacgctccgcaagtacttgcatatgcggagtgcggcttccgcatctcccgcgtcgagacaatccccgcgctctcgctaggccgtgaggattccggtgagatcagccctgaaagattcgcgagatcattcacacgcacatgtcgttcgggtccgccagaccctcttagtgctctctgcggcaatggtccgccgatcggtcgctatcgaggatctcatggtaggcaaagttcacataccccggactcgaatctggcgaaatgtagcgagcgcggccgacccggggcaggggagtcatctttacgtcgtctcgtacaacgaagaaagcggtactcgaggttacctattcgcaaacttgacgaacaaacttggacaggcgtaaactgcaggccgattgagcgacttcacaatattctaggagtccagctcagttttcaaacacccgaatacaagacccatcaccttcgcaccggtacgaaggagcacgcccgacccttccacctcgtatcatgacgcctgcacccccgtcttctcgtcccgtcatagcctgtgaccgatgcaaaagcaagaagagaaagtgtatcagagaagcaggagccgatgaaccatgcgtggtgagttcagtcgatagatgcccaagtagatcgagtcgaagcagaccctgacgaacatgtctagcgatgcacgagccgcaatatcgcatgcacaaccaccttggagtgagtgctaggtcgatacgcaagacagccagaggctgcaccgtgttggcactgctaatcttctctgcatcgctcaggcgggaagaaaaggccggccctccttcgctctcgaaacgggtccagcagctggaacatcaactgctcgtagcccagaccgcgatgcccgtgcccacagcgactttcgacgaacgagaccggaccatcggttcgtcgtcttctaatttgcttgctcgtccaaattttgagcaaagcgagagtacgagcggccaaagcgaacaagagatgggcgtcgcgacgtctccacagtcatggacgattcaacgcgtctcgaaagccggcatcgacgagtttcacgccgtgaccaactaccctctcgacctcgatagcaccttgaatgggattcgagccgatttgaggactcccaaagatatagatctgggtcgttcgcagggacgacacggcgggttcgtgccaggcatggctggggaagacggctggacgtcgagtcgcgacgagtctgctcaggacgagcaggttcggacaggcaagcgacgtcgcctggacgatattgggatgcagatggactttcagtccggtcctatcagcgattcggagtatcgcgaacagcatctccggatcatgccgaacgaccttttcgggttgcctgcacgtctgtctactgcggagagggtgatctccgacatcctaaatgacgtcgagatcgaggaactatatagacagtgcgtactcttggttcgtctgcgatttaatgctgtctgctgaatcgggacctcgcccctccaacaggttcttcgaccatctgaacccgtacatcgcgatcctcgacccggtcctgcacacctccacctactgcctcaaaacgtcaccggtactgcacctggccattcttgcgaccgcagctctcgtcttcagaccgcactgtcattcgcgactattgcaccacaccaacgtgctgtttggcgaggcgttcatgacggggctcacatcggtagggctctgccaagcgctgagtataacaagcatctggaaggagccatcagacaacaggcaatggttgcgagtaggctatgccatcaggtcagcaagagcatctgccaccttctgaccagaatctgatccgctatcgttttgttgattcagagccgcttacgagctcggactcgatgcgaaaccggctcgtcccttgcctttggatcaacaggctgctcgagaacagcttgtaggtggtcacgctggtactggagcagcctttcgtgctgactcgagtctcgcatttcagaacaaggaacggacctttcggcaacttgcactctttgacaggacgtgagtggcatgttccttcgcgatgctccatcaccctcactcacctcctcgtacccgtttcagattattcgatctaaatggacgtgcgcaccgcatgatctcgcctgaaaccatcatcgatcttccagactggatgaaagaccatccgactgtcttttgctactcggacagcatgctgtgcgcatccgtccctcacggcgaagcaatcactcaaatcctttacggaagtcatctcgacgtcgatggcaagacgtccaacttcatcgccgccaatatccaagccgatctgaggacgtggcagaaggcctggctcggagagacgcgtaagtctttggtcggcagcaggttttcaggcgcataaggctaatttggcacgccctttagcacctgccgcgcttcatccggtgtcgagatgcatcattgggttctatagcctcaccaacgagtttgaaatcgtggagtggatgacgaggacggtcgcgttcaggaacaaggctgttcttattccagatcttttgtcgcgagcgaccaatgtcttgcgatacacagtgtcagacttgagccctgttggggtgctacgctctgcgcctgacatactcaccttcaagatcgccaaggctgcatttctgctagtcaaggtgagccattcgccgaatcgttgcttgtcgaccccaacctgaaccacgtgccctgcttgtatcttagcgcttgcctgaaatgaccagcacgatggcgcgagaaaccatcgatctgcttctcgatgtgaataacgtctaccaacagatcgcaaacgtcaatcaactcacggaacagacggcacgcttctacgacaggatcgctggcatcgttcgaccgcgggctgaccaagtgtttgcccccgatatcaacatgccattccacgagtggtcatcgggtcaacagacggtcgagatgaatgagccaggacctaatcacatcttgactgcggtgagccactgacccgcgggcatcgaactatacaaagctgacggaccctttgtcgacgtttgcctaggacacattcgagaccgactgggacggcgctcttcaagacttcgtcaactggtaaggaccggcgggatggtcattgccgcatttagaggcactagatctgatgccttcgatcgcctacaggcttcccgatcacttcctaccagacgtcaatgactttgattggcttggcgatatgccccgcgctggatgagcagcgacctccatgtacccttccactgccaaattttcaccccgcatgcttggatatcataatttcacacgagttcccgcagttacagcctccgtggtggccgcgccatcagcttgctcctccgattttcgttcgccaaggcggggtggaggatgtggtgtccccaagcgcggactcacacgatctggacgcggccccgaccgcccccgcatctccgcgtttgggaaactgccgtcggcaagtgcctagagtcggtgcataccggctcattcagccactttcttcttcaactacataaagcttgtcaatgagatgacttctgaagacaactggctgacgtagcgctctcttgtctcatcgctatcactcactcgacagcaacaataccctactcattatgtctggcaagaccgatcacgataaaaaccaaggcctcgagcatatcgagggctcggatgagaaacatggcgctcaggaagaatcaaccgagcaagtgaatgtgctcgctcatttgtccaaggcagacctgctctccgacgtcgaccacttcattgctgacaagggactcgaggagtaccgcgaggatctcttcaaaggcgccctcttggcgcagaacccgcttgggtaccaagacattgaagagctcaacgccgaggacaaagaagccatcgcattcgaatacgctcatcggtggaagcatccctttaccttgtactttaccattgccgtgtgctctctcggtaaggcaaatcgatcgattacgcggaagcgctagctgagttttatcttggcgcgaccctcaggtgctgccactcaaggatgggaccaaaccggaagtaacggtgccaacttgagtttccccgctgaattcggtatcgcctcggggtcccaacgagactcgtggattgtcggtatcgtcaacgctgctccctacctctcggcttccgtcctcggatgctggctttctgacccgctcaacaactggttcggtcgtcgcggtaccattttcatcactgcctgttttctcgtcgcctcgcctatcggttccggattttctacctcgtgggaaacccttttcatctgccgtatcatcatgggaatcggaatgggagccaaagcgactgtagttccaatctttgccgccgagggtgcaccgacagccattcgtggagcattaggtaggcgcggtcgggtgtcatgtttgcaatgggtacggcgcgtctgacacttgtctttgatgcgcaatgccaaagtcatgagctggcaattgtggacaggtgagggtgacttcgaccttgcttcggttctgacttgctgagttgacctttccacggtctagcatttggcatcttcatcggtttctgcgccaacgtcgtggtcattgacacgggcgctatcgcgtggcgtttgcaactcggatcctgcttcattcccgcccttccccttggactgttcgtctttttctgccccgagagtcctcgttggttgatgcgcaagggtcgataccccaaggcgctccgctcgctttgtcgactcaggttcacccgtcttcaagcctgccgcgatctctactacattcacgctcagctcgagatcgagtctcgtatccttggaggcgacacctttatcaagcgtttcgtcgagttgttcaccatccctcgggtcaggcgtgcaactgcagcgtcttttacagtcatgattgctcagcaaatgtgtggagtgagtcaaagatccgcgcttacggcgtttctgaatttctgattgccatgcgctaaccgttcgactcgaaaagatcaacatcatcgcattctactcatcgaccatctttgttctatcgggatacactgagaggcaagcgctgtacgcttcgatcggattcggagccgtcaactttctctttgcttggcctgccgtctacacgatcgatacctgtgagctcagatccacgccatccggactcgtaaaagcacgtactgatgtaacgcttcgcagtcggtcgtcgaaagctcttgttgctcacgttcccctgcatgtgtctctcgctcttgggcgccggtctttcctacttgattcccgaatcgtccaaggcccacatcggcatggtaagtcgcggtcctccatcgtcagaaatacttctaaccccatcatttcacgctcccaacacaggtcgccttctttgttttcctcttcgccgccttctactctcccggtgaaggtcctgtcccattcacctactctgcgtgagtgtcaggtctaagcctgcgtagctggcaaccgcccctgctgacttgcgcctcgatgatccgcagcgaatgcttccctctgcgtcatcgtgaggtcggtatggcctgggccgtcgccacctgtttcttctggtcggctgttctctccctcactttcccctcgatgttggacactttcgacgtcaccggatctttctgcttttacgctgggctcaacgttgtcgcttttgttatgatctaccttctcgtgcccgaaacgtctaagctgagtctggaagagctcgattcggtctttgaggttccgacaaaagagttccagagctacaactggaacaaagtcctccctcactggtggaagaccacggtacttcgccagaagctccccgctctcgagccgttgcgatctcaaaaagtccgggaggatcagtactaaggggctggcatatcgcaataggctggatagcggttgaccgtatggagtcactggagacattcgtggtatgatgaggcaagatgggagaaggacagagcaaggagattcaatgatgtacgagtaaacatctggtagcaaatatgacactcatattacggtcgacaaacgatgtacataaaatgtgcatcaggggatgaccttgtctttacgcatcccatcaaatacggccttgaaatcatcctcccatgtgtcgaagtttgaatcatacccaatccctttcagcttttcgagtgaggccttgtcggcccacgtcctgcacgttgtgaagtcgagaaaatcccaagtggcgtgatctttgccagcagggtccaggccatactgctcgtacatctcgtcaatgccttgcttgttgctcttggccgactctgtcacggaatgtaaagggaccacttccgagccgaagtcagcaccagccgggaccttgtccgacggtgggccgggtggttccatctgaaaatagctgtgaatcatcgcaaacatcaggcaaatctcataagcgagacccagcgctcgactcacgcggctgttttttcccagatctctccccacttggggcaacgaccatcatgcaaattgtatgcttcgtcatacgcctccttgtgggtcaagagatatacttgcgcgcctgggcgttgtgctttgagctcgaaaagccatattcgaggccataagtgatatctgagccggggaacacgaggtgtttgcccagttatttgagaagtgcggcgtattgtccgagcgtaaccgcactaacgacatcaaacgcaaaatcgcttagtcaagatctcatggggatgacatcttgttgtacgaacagtgacatgaagttgcccttcgaaagggtcgatccgacgagtcactcgatgcggtcggcttttcggtcccggccagcaaatcgaaattcggtcgaactcactttggactgtccgacgataaagtttgggcgagttataacccaatgatatcgatgtttttcggcgtgctctttcagcatgtcctcttggacgaaataaaagttgcctcccttgtgcctaggcgcgtcttctttgaagggataacgggcaaggtgtccgcctcctttgtgcacgccatagtctacaacatggagaatcgtcagcttcagttcggactggtacggtggagaggatcggcacattcgcatttgtatcccgtctgaagtagcaccacgtcgagcttgtccccagaagcgatcaacgcgtcgagagactatggacgagcggggtcattcatgcccagtcaacgcgcggcgccccgatcgagactcacgtttctgaacaatttctcattgacctctatcaacttgtcctcatctttctcggcgatatacgcgtagaatcaatcacgcatgcgtgaccctgctcacgtcggcttttttcaacgcagtcgcgatgtcatccacactcccgagcaggtccacgctggcgtgtttcacgcggggatcctctttggacagggctggggtacgacgagagacagcgtagatccgatcccactcttgaggactggttgatatgagggcttcgagagcggccagcccggtgatacccgtagctccgaaaactgtttcaacggcaaatatgttgcggttcatcgaccgtggacatgatgatggacgtgtggcagcgacgcagacttaccaatgatggatgacatgtctcgttgtagatggataggtctgagtacacctagccacacggagcgaggtgggactgattgctgatgattgcgatactcaaagatcaaagcatatcatatatcaacgcccgagagtacggtgcgcgttgattaggtcaactgccgggcaacaacgatccccgaactgatgacgccatcgaaacatctcggacgtcagcaatcggactgcaacgttttcacgagcgaattctaccagctggcaacggcccatcggcaaacgaatcactatcgaggcaattagatatcctgcgcaccatcttgcccttgggtatatcgatgccgaatgttcaagttgcgtgtcagtcggcacggcagtttgtgtttgccgtgaccgggatcgtttcggaagcatatcgatcaattgctcggaagctattccttaccgacagcctcttcctttcttttttcgcttcaagtgagtacccttcgctggactcgcttcgatgtgccctccgtcgcatctttatcatcgaattcctccacccttttctcccgaggttattaccgtggaggacgatgctgcaggggagggagagggagaaaagtggaggggcagcaacgtcaaaagtggaggtcgatcaccgagcggccggatcgccgcgtcatcacgctgcattggaggggtaagggtaagaagcatatatacatccaacgttcaccttcagcttgactgtttacggctcgactcttttctgtctctactcctcactcacaaggaagtacaatacatcacacaagacccaagatgagcatgttcaacccccctcccgcgcccaagacgcctttggggtaccgacgactcctctccccgaccgccggggtccgcgtctccccattgtgtctcggtggcatgtcgctcggttccaaatgggcaggtcagtgaccttcatgactctcttcatggcgctcgcactgacccgatcatgataatcactagacatgaccggcaagatcacgaaagacgccgcttttgagctcctcgacgcctttgtcgaagccggtggaaactttatcgacactgccaacctgtaccactttggtgaatccgaagaatggatcggcgaatggatggagtcacgtgggaaccgagaccgcttggtcattgcgaccaagtacagcgggttcaacgacggcgagaccaaggacgtcaactcgatgggcaaccatttgaagagcatgcacctcggcgttagggagagtttgaagcggttgaggacgagttacatcgacgtcttttacgtgcacttctggtgagtcttcgactgatctccttaatcacctagtctttacatgtctgaccgagccgatggcctgccgcagggattattcgaccaccgtggacgaggtcatgcgtggtctacaccgacacgtcatgtctggcgagatcctctacccggctatcagcgacacaccagcgtggatagtcgtcagcgccaacgactatgctaggcagcacggttacaccccattcgtactctaccaaggtctttggaacttgtccaagcgagatgtcgagcgggagatcatccgtgagtcatgaccttgatcggaccgctcacaccactgctgaccctcaatttttgcatcttgacactacagccatgctgcgcaaagagggcatgggttttgctccctggggtatgatcggacagggcaagttcatgtcttccgctcagctcgccgagcgtaaagcttcgaacgagcctattcggggtgggcagcaatccgaatcggacatcaagattagcgaggcgttggccaagatcggtgacgagttgggagtgagcgtgaccgccgtggccctggcatgggcattcaaaaagatgccatacgtcttccccattggtgagctcaatctcgatgcgccacagcttcgcatcaccctgctgacctcacatcgccccgcgtctgctctctcctagtcggtggtcgcaagattgaacacctcaaagacaacatcaaagctctcgagatcaccctcacggaccagcacgttcaggaactcgaggccgtcacgcctttcgagtttggattcccttacgacgccttcggtcgggatcctcatttcctcggcgagacgcagaacagggtcatgaaggctagtgatcctattcaatgggttcagggaatcgagtcgatcgaatcaaggaaatagaaggttgtagtcacgtttctagtagcgccgagtgtcacatcgtaagatcgtagaatacaacaacgaatgcatcaatcacgcctacatccgttcctgtcgaacccccttcatccactcgagcaagagcttggtgaagccttctggattctcttcaggaatccagtgcatgctatggggcacaagcttgaactcgacgttctcggctagctccagcatcatgtcatgggcgagctgacaagccgaccgggttttgccttcagctccttgcgaatgaaccgagtctcgagtgatgatcttcatccggactcacctcgcttaatgggctcttctccccgccagaagctagcacgggaatgtcgcgcgccaacttgccgtacttttcgatgttctgcttgacatcgtcgcagtcatgccggaaagccctgtaaacctcgaatcccgccttcattctcccgggaccggagaacgctgcggtgtattcctctagatctttttgtgagaggaaatctggtttgctcgtctatagcgattgtcgacaggataagggatgcgcgcgattcggaaatgaacttgaggagctgacgcactagtcgatcgtaaaagctcttgatgtacagtccttccttgccctcggtgagagcttcgggaagatccggagctgagtacacacattaagcgaatccattctcaatgcgatgccaagattcacgcaacattcccctagacgtacccgtgtggaagaagaaatgaaataccctctcgtatttccagacgtcttccgtcgtcgagatgacgtacgctttagttcccggttgagggcattctgtggcatttcgcagatgtgagtgcacggtccgattgtctttctacgtgacccacttaccactggcatacaaaccgataacatcgtctcgatactgcagagccagcgcagtggcgaccatactaccgatatcgatccccacgatgaaagccttgtcgatgccgaatacctcgttgtagagcgcatgtatatcggccgccattgtaaacttatcatagcccatatttgcatcgggtgacaaggaggtctggccagctccacggtagtcgggagcgatgacatgatagcctgccccggctatagcttcgataacgcgtcgatacatgtaccaggtctgggggtatctatggcaatctcaaccgggttgagagttcaccaattatcgttcacgacggaaacgacccacccatgtagcaagaccacgcaagggtcgccggtctctcccgcctctgcatagtgcacgtcgataccggtcgataccctggcggtcttgtgtttcaaggtcatgtttcgatcgcttggcgtgttatgctgtatataatggatatttaatcgtacaacctctcaacccttgaacgacaggctcagctacatgacaggatcttaatgcagaatacttgtgggacatgttgcctggcatgcctggattgacggcggggacctctgagcgttcgtcattcatcgattcctatacattacccggatgatgtcacgatgaccgatctcgactagcgcgccgaaattctcggcagcatctacacgaatggacgtcttttcgattggctgacgaaacaggaggcgactagcatttcctgacattctcaagtcgcacctaccgaggatacagtatgttatcatgattgatcatgatcgacagggctagcgttggtccgggtgctctgggagctttcgagccccggcaatagccctgtcacagtgacgaacgaaccgttctttactggcgagaacggcccagatctggattatagggattttcgcacaaagttaggccttgttcacgctttagactgttgctgctccttttcttctccgtgggctttagagatcatcgactcgtgcagccagaattgagggtatcgcctgttgtgaccagacggatttcagtcgcccatcggacctgcactggtgaagctggtcttacctagtgccgaggttattgatgattagtgcccagcccactgccaccaaagtttctgtgaggacgtatcccacgtctacaatatgatttgtgccggtgatcagcatcttcgggtacggtcaagagaaaagcggtctgctcacacatccagcccatatggtaggcagccgggttcgtacaggcgatgacagccgcagctccccccggtgcggatctggcaccatattgtcagaagggctgttagcctggggttctaatttgccgatcgccacctgattccgtttctactcacggagattctagtatctgacaggccaagagggctaacgcagctgcagtggcggcggctgcccaatcattgtcgtagttactcgggaaagtccctggtgggaccctcagggcgaacaacctggcgatcccgacaccgatgatcgaggagatagtgatacccacgatgactggccggggctgattgataggaagtgtccacgaagagtcttcgatccgaaagttcctacaattagtggctggacttcgctatagtgagtctgctagacatacagaccagtacggccatcgccccaaatgccccgatgatgtcgggcgctcctcggctagcgaacgggttcgccttcgaagtcagacctgtatcctcgtctcggcatcagcccgtttctctcggtctgctctgacgataatcggatctcaccgaccaagatcaatccgacataggcagcgatcaacgtgtgcacccagtactcgactttgcgcatcaggcttcccgatcgaatgcttttcgcgaccaagagcgggtcttcctcatccttgggatgagatttcctgtatcctagaaagtaggagactgggtagatagcattgccaaaagcaggtgggatatccatgatgcgatctgagctgtagctttaagattgtggcaggagtggtcgaggtcgttcagttgattcgaatcgagataaggcgatttacatactgtctagtgcagtgtacatagtgtggcattggacagccgttgagaagaaatagccatcggtgtctcgctagtccgctttttttttctgcgctcagtccgaaatcgtaatcttatcggatcgatccgatgtggattggcggatcggatgatggcttcgggcactacgtgttctcgtctgccacgcccgctgacgcgtttgattccagcgagttccagtagtgaataaacccccgattccctcgtcgccattatcatttaatcttcgagtcgagcgctctgagcggatcttcagtgactggtattattttcttgaaggttaaacgccgggcggtgggagtcgatctcggggagggttaggggttaggggttagtacaccgtcgtgttgccttgggagaatttcgtgaacacgtcacctttgccatgcctccttccggagccgacgccaagcgattcccgcatgaccccgtctactcgggtagtaaggggcttctcgccgagactgctcctgacatgaagggatatgatctctgggcagacgctcgtagccatcatcagtaagaacccacgggctgtcatttaagcggaaggacattgaggagtggacaagcgatggaaatgggtctggtcggcgaagcccacccgattatggggcataatggatcgcatcgctggacaagacgatacggatcggtgaacatgttcatcagagggtgcagcacagttggcgactctgaacacttcttgatttcctcattgtataaagacctatggactggaaataactccgtcgacaatctctaacctagccgaatggcaaggccagttctagccacgaagccgtcgaggcgtgagctatagcgtatcgtaatcgcgagcgtccagtacgaattccgtgacctggttcatccttctgcgcgccgagattcgacgatgcggagttcaggcgcttgaaagaggctgaggagctcaaggagttatcaagctcgaacggaatcacattccaaaattagacaacaatcctttacgaacgatcgcctcagcagaagatgctgcttcgagacccgggccgaaacaacggttgcggtaaagtatctatgattcatagtacgacactcatctagtaaaccacacattgccccttgatgcaagctacatcgtctcccaactccgagcagtcctgaccgtcctcatccgcgcaccctccgcaatggaagatgttacttgaggtgtcgacacaatctctataacatcgacggtgcccactgaccgggcatgaagcctccaagcgagatcttcgacccagcgaactggttggacggggccctggtagagggatctcagccccgagcaaacatgcatcgagccccgtcgatcgatagaagatgcctacaaacgtcgctgtttgagcacacagctgagaaccgttgtacatggcactgaccttgcttggtgtccttttgtacggagccatcggctcgcgtgacttgagccgcaaaatttgcgatatcactggcgacagcagcaggcacgaaactgtcgggacagagatttcagaatcttcgtcgagagatcgcagtccgatgcacttacacgctataatactaagaacggtcgatcgcaggggaaaggattgacttcagtcttgcgtggtgcatgcgcagcgcatggtgactgacgagatagggtgtatccgctcgagctcgtcggtagtctgcaagaaggggcgggccctgactggcccgggtagggtccgagatcttgtcccaaagtagctcgactttgtccttggggctgtacgggcccagtacagccatagtcacattaattcctccattggcgtgccggcacgtaaaggcttcgccttggtcctgtaggccgattgatatcaactcaacgtaggtagcgggattcatccatgattgtgcttacaatcaatatagtgtcatcgattttcaagatctcggtgccttctgggctggagaaaacggtcccgtcattgagcgtcaagacaaccttcagcgcggagattctacgatgaagcgtgttggccaacaattagtaccgccgtcgacatcgaacggccgatatacgaaccccgtaatcggattcactgatcctctctgcatgaggagttcgaagcgagaatgagctcgcggttgtagacataccacttcctataattactcacagtcgagaagtcccgcagctcaatcgatttgccgttggagatggtcctgggggcccgaagaaacagcagattgaaatccgtaccaggcgaaccgtcccgattgaggtaggtcaattcgtaactgcgatattttccggccatatcatagactcgtgcgctaccgctctgcaagttgagcttctcgttacggagagtgatcaacatgccgatattgacggtgaacggtgttatggcgggcgtgagcgaggtacctgcgggtacagttttcaaacgtcatgatgtctgttaactgtcgctcctagaagacgtaacatgattgggcgcgtcgctcaccatcattgaacattttgccgaaggaggaaatacaatcggtggaaaaggcgtcctgcgacgcggcgtagcgattgatagtagcattaccatccaccgagaaggtccgggagtcggaactccttgcaagattgcccaggtcttccggtgctgtaggatcaaagtgttgaccaagaggattgatagcactgccatccacgaattctttcgccacggcgttgtcgaacacggtacgcgttgaatcaaagctgtgaggcgtatgatcaactttgactctactgactccgcaataggcctggcgatattacgactcacggtgcgactctggcagaagttaccagaggggtgtttgcctgtagattacgcaattcagtctccatggcggacttgacccagtcacgctcagcttactccgtgcacccctccgatgctgtgtccgcatgctacaagggtcaccatttcttgcctagagacacgtgcgcgacgtcagtaatctttcgagtttcacgcttgtgtgtcggcttacggcgagaaacccattctggcgaacttttgaagatgagtctcggttgtctcctcgggtaaaggcaatcgtccctcttcagcggggctgcctgcgtctagccttcccgcatgaaaagggatcgcgggtccgccacaggcctgtgagaggcgataaattgatttgaatcacttgattaaagcacaccccaggaagggttccgcacgcaccccaacagctgtgatcgctcctaaaacctatcctcgagcacgtgctttagcttgtgagcccgacgtccctgtctacaatctggtctcaccaccatgtctgccaaggtcaccccctcttgctaaagtggcaccaacccatgcaacctgtcagtattgtacgccacgtatgtaaatagcatagtcgacgcacctgaaatgttcggtactggttgatggtggctgtgagaaacggcccaaagttctcgccccgtgcggtttcgaaagcgatagaaccgtcgatacctccggttccattggcttgatcgtatgatccagcatcgtgaaaggcctattattgtaaatgagcgaatgaaactttgagtgtacctcgcgatttgacgtaccgttcggagccattctgccgcggtcgttctagtagaacctcctactgtgcaaggactgagcttgacattgtcagatctggttagtcatctgagataagcaaggtaccgacgacttacgctaccaaaccgacaaatctcgagtcggtcatcagcgtcctgagagccgcaacgttcggctcggcgacgaccgtgaacgaagggacggccagactggtcaaggcgctgatggtaaacaacttcatttcggttgtgatgaggtgttgatggtcttgagagcggtaattcaagtcaacagcccaacagtggcgcttgctcctcatcttatatggctcaatcacctcgccggcgacatatctgttgtttatcattccaaaagatttccgtcgcgatctggagcgcgttgatggccgctccgtattgctgatcttgctcgcgttcaacctcgggtagatcgttccatccgccctcatgtgccattatcctcttccatcgagtgtcaagccacaggaagttacgcttggcattgcgcttgctggtccaccctctccagtcccgtgcggtttatcagataaactcgaaattcgtcacttccgagaaaagcgacggagccaaaattcaaggtttgtcacgagaataggtcacaaacccgaaacgctaagccacatacctgcaagacgcacatccttgtgcaactcttgcccattgagtccgaagccactaaatatcatgtgcgtcgagttgcatgaacgatcgactctcgacggctccgcgtaaagcccatccctcggctcccggctatatgcccttgcatcgtccggtcttgtcggaggcttcggttgaggctgccagaggcagcggctcgtagagcataaatttgatgatggtgtacaattataaaagaccaggccaaggtgaaaacaccagcaacaacaacggatgacaacgcgggtctcttgcgttccaaaaagcataatcgaaatgagttcgcagaaatgagtgaggtcgggacgattcaaccccttctggtccgtttgttgggtctgacctggacagccgcgtccgcatcttctacctgaccttccgcatcgctctcgtgttgaggttcttcttcttcctgctcgtcaagagcatcatcccggcctcgcttggctcttgcagcgttgggtaggttgttaccttccgctccggcttcctcttcgttgtccccagccgtatcttcgtcttcttgttcgtcaaggacatcctcgtctactggctcgtcgctgccaataacttcgtcaacactccctgcttccacttctgcaccatctcgattgcggcgctttggggccggcttctccacgactgggaccgcctcgtcgtcctcgctatcctcctcaatgatctcgcgagattgcacttgtttcttggaggccgctttgaccttgttgtccgaggcagccacggtcatcagacgcttctcgtaatgagtcaacgggtcccaagacttgttcttggtcgacttcaagtcgaggtccttcagcgtggtgtctaaatggtgtttgctgcggtcatctcggtaagcacgattcggggatgttgcgataagacgcaaactcacatcttcagggcttccctgccctctactcctggcagcaggatcccaaggactccaaagtaacgaatcgctcccgcggccttgcctctaaaacgttccttgagtttcttgaccgtggatgccttctcctgcctcaagaatcccgatgtcttggtcaacgcccacgacaagccatcctggtgaaattcactgatggcagaagcatccagttgtcgttgcactttgaaggcagctttatgggtaaagaatgcacgggagagcagacgcgcgagttcggtagtattgatcggaagctcgtcacacggcgattctaagtagacttcgaacgactaacggatccagtgggcgagcgtgagcaatagtcctgagtgcggtgaccgacttactacttacctgctgcaaagcttgagccacgacttgggtgaccatttccgaatcgttgttatagagaccctcctcctgcaagacctctacgagcgagggcatggcggcatcgaaagactggtccagtcgtccgtattgcgatagcatgacgccggcatgctgagcgtcaattacgcgagcccgcatggcgtggataaagctccacagcaggtcctgaaggggtgctgacccgacaagagtctcggtcgtcaagggcttgtctgggacattgggaccagacagggtgagcgcttaaacacagcaaggcgataacggcaggcctcctcactcttcccatttttctcccctcgctgctttttcccatctccggcagtctcggcgtcatcatctgcagtcaaatcgctcgatgcgtccgagctcgagtcgtcgccgtgttcgatatcggtctgtcgttcgatggcagcctggattgcccctgcacaccggtactgaatagcgtcgtccatcgcaagtgagagtacttttcgtgccggagcgactttgctgtcggcagggtgcgaggagattggtcggaagagcatgtgcaaacgaaggaggttcgagatggcctgtttacgtgcaccaatcgttagcccaagtcgttcttccactatccgaatccaatgctcacctctcgacggactgcttccatcgcgttggtctcattgctgacagcatactgctcgtagacccgagccactgcgtctcgttgtttctccacccgcacgcgcacggtctcatccgagacgacggactctagcgtcaagtcgcgcatcgtccatgacagatgtaacaagaggatcgtcatggcatattgtactacctagtcgaccaaaaggagattgagtgctggaatcatgtactcgaggtccctcaacaactggcgaccaaccttgatttccggacgataccccaattgaccgcgtgatgccaaggcgatgatgatgtcaaacaggtcgaaatcctcgccatcctgatcgcctgccacgaaaagcgactccacgttgtattgagacatcaatgtcttgacccgcaagagccccgattcgatgttctgcacgtcttcgtcctcgaaagaatcgattgccaagtctttgtcagccaatgtctcgtgaacagcggtcgagagtgactctttgagttggcgaaactgttcctgattcgttgcctcgagcgatgtcgtgctcatcatctttcgcatcaatacgagaacttcccgcaagaccacggcatcggtgtgtcgtaggaattgtcgagagacgtcgctccacattgcttcgtaagcctagaaacgggttgttgtgttcagctgcaaggacaagaagacgtcagattaagatcgctcaccggtacaagtcgcagttccgaataagtttgaaagtcaatgtgagatgcaagacgcaggacctcgaccattctgctcgaatcgctttggtatttcgagaacagcttgggcagcgtgtcgaccagctcttgcgacaagtctgctgctgtggtatcgtcttcgtcgttcattttctgtccatctccgtatcagcatgtggctagacaagcagggtcccactgcaactaacctttttgcttttctctcccgacacggccttcgttacgactacggtcgcaaaatccaagaagaacgtctcctgctccggctcgagagcccacagcttgccctcgtctttgcttgtcgaatgatcgacggcgagaaaggcgatcatgctgcgccagtcgtgtaccgattggaggtccgtgttccaaaaggtctcagcggccaccgtcgcgtgcgtgtgcagtggggtcgttacgctcgccagagcagcgagcagctgtcgatcgcgctgagcctgagcttgctgtgtttgtgtctgggttcctggagcagagacttgagaatcctggggatctgacgatcgctcgagccgacttgagaatcccatgagcattgaggccaagactttcatttcgatgaaccgctcctcgcgatcggcatgatctgtcgctgttccttcgataccgtcctcgtcctcgtcctcgtcttcagccggttcatcgttttcgccctcgacatcatccatctcgtcgacgttgcgcttcttgggcggtttcctcttcggcgtcttcttgatattgttcttcttggcagcggacccctccggtgcgttacgctcctgttcttccgctacctgagctttgacttcctctgtccgctcgttgtaccaatttcggagcaatcctgagatcgccttgcgaaccttgggatcccggtcaaaaagaagacaacctaaaccttcgcgttcttcttcatcctcgtcactcagaaagcccgaagcatcgagcgagatcaagacctttatggcctcgacgcgaacgggtacgctgatgtcacgcacggccatctccatgattcggggaatgactcgggtcgtgaatgtgcgaatcgaggacatgttatccgtcttgttgtagagagggacgagaatcttgacagcttcgagtcgggtatgttggtcctacggagcaaagaatgaacatctcggctctcgagtaatgaacgctgcaccgtaaaggccgacttgactcacctgatccgtcaaagcccaatcgacgtattgcagataagttgtcgagttgaacctctggggataggcggccatgaatctgccgagcatgacaaggcaatccgagcggatcgcagcgtccttgtcacgatatcgatgcacaaacactctgcaggcgattcaccgaaaagatcagtcgtcgatgtaatgtcaatgcactcagccagatggacgccaactgacccatcaaagatgacatctagataatccttcaagatcgccaatttccgattcccgtccttgatctgcgcctcgaacccatccgccttgccccccttggtcgcctttgccctacccttctttgctgcctgctgatccctccccttttcagcggtactgacaatctccttggtcttctgtgcgactttgctgatgcccactccgagggacatggcgatgaacgtggcagtatgtctgatcgctcggtacggactcgatgtcatcgggttgagccatgtcaagagcaggctaacgagcggtgtcgtgggcccggtggctggtggcggtgacgaatcggtgacgtacaagaggggaccgttgttgaggagatcgataaaagtgatgagcatgtcgggcaagtttttctggattcccttgaagtttttcgctctagagaccagcgggtagaccgggctctgtgaggtcgaccggttctgcccgttagtgactgatcttgactgtgaccacacgatgatcgcctggcctacctctttagcctcttgcaactcggtatgcacgtcatcgatcctatccggtgcaccatccacatcatctgccgcgtccggtgagatctcgtttgacaatccgcagcactgccattgagtcgatatcgttatcagctctgcttttttccttcgctaaatgctaccgtcaggctcaccctccaaatgaaagtgattaactcggccaggtaccgcttctcctcttccctatcctcatcgtcatctcctcccgtgctctgaaagttgatcaaccactcttccaagacttgcaggatgggggtatccgggttcatcagagcgtctacgtgcggagaccatctcatcagcctgaaatatcaatctgagggaagcgggaaagcagggcggtacttactgaacagaccgttatcgtcgctaatctccatatcgccgtctccgacgagtttccccgatttccccttgctccttttcgagccactcgctttacccttgctctttgtcccggacccggtcgctgccatcttcttcttcttcccagactgatccgccttcttccctcgtttggcctgatttttcttcctggtcaacgcggcatcttcgtcctcatcctcgtcatcgttgctatcatcccgctcgtcaccctcgtcatcatcctcatcgcttcgatctcgtggtcgacgagggctcttcccgttcttcttttgtgctggaggattctttttcttcttgttggtgggacggactacgatcgtagactatgtttatggccagtgcgaggcggagtagacaggtcagtcgggaggaatgaggttgttgttattgtttcggtgggcgagtgaagcgaatcccgatagggtgagtggatatgattgttatggtcaaacgatagagaacagggccatggcggttattgttgatgataagacagtcaagaagaatggcaaggtgccaggtgagaacgagatgagatgaagagagaccaggcagatgctcgaatcagccatctgatcgaaattcacccggaatgtaacgatgatgtccgtcttacgtggtcagactctgactcttcctcggtcaaatcatctgaatcttcttcttctacatagcacgccgtcagatcagtctcgttccttgcgtgtgtgtcgttggccggccagactcaccttgatcgtcatctcgcgcctgattcttgccgtacgcctcgggtacctttctctgcctcccgctccgtctcggctgttcgtccatctcgacgtcggacatggcttggacggacttctatctcggatcccttgcgtgttcgaatgtatcggcagcgtcgggatagctggaggactaatccatcatgcatctaatcgacgacctcgatcgaccctggatccatctcggtcgcgtcgacctcttgatttcatctcagacgcgtcgaaacgcgtgggaaacgcgaacaaagtggcggccatcatgtcgagcgagagaagagggtggcaagattcgactcgccaggcatggcagtcgactgctagctggtagtgtggtaattgacaaaggaacaaaggttgagctactaactggtgctgtatcaggtcgctactggagagcgtgatcagctgaacccctgagatggcttcctctcatttgacacaggatggcgtgtaagtcgatggaaattccgccgtccagtatatgatgtacgggctgatgcatccctcgaagtttccggcttagatcgtcgctgccattgcttagacccgtatactctggcctttaccgattgcagtcatatctactcatcgttgcgcaagatggcgtctcggtgctaacgggcacctttgaggagatcatcggcgaacaagactttgccaccgttgcgtacatgcaggctatgtggttagaaaacttaccgcggtctggtcaagtctccagcttgtctctctccttgtattctactttgtatcaaccccgagtacgtgcatatggcaacattacgcttacgcacacgaatgcgcagtcgaagacgtgtagtaacaaccagattcttagaccaggggcaggaggaggatcgcgcccatccgaacatagcttataaagtgagacgcatcaagggccaatgcattctccagtctcttgcctaggcaccgtctcgcgcacagtccatattcacccgtacccacaagtgccaatcatagcgcttctgttagaatggctacagcaggctcatttgcgagtcgtgacgacattgagcacaagtacatcggtttctacaaacgattagtcgctgtatccccatccgctcgcctcaaaggccctcgcctctgcggccgtgaccaatgggaagtcggccgcgaagggtactagctgctcccttaatctctccttgttggaagtcgtgctgcgaagcgcgcagaggtgacgagtcagcaaccggccttaaacctcgccatgacgaccttagctgtgaacgcacgtgacagcgacaacaccggtactcttgagccaatcaaagatcatctgcgcgtaagtgacctccttgccgtattccttggacagcctctgagtgatctgttggccgatcacatcagccgggccgttgggagagctcgtgatgggctgcgaaacggtatatgtaaacgaggtgtcaacgatgagcaccgactttgccgagtcacaagcctagacgcacacgaagctcgccataggcagaaaagagcattccgtgttgagtgccaagtgcgattgtaggtgccttttcgacggcgttgtacaccgagtaactgcgagccataccgtcagagacatgctgagcgacatatcggacaacgaatctacccacttgatctggttgacggcactgtccgagcgagaggctgcagcgtgagctctctccctccactccagtcgccaaccgggaactcacgggaagacctcggcgaccctcaaaacctccttgaccagctcgacggtgtcgtaattgctgatcccgatactcctggccaatcccttggctttgaccatttccatctccttccacacctgctcgatccctcctccgttcgtcgccgctcgggggaaatgaattaagtatagatccaggtagtccaactggagctgagcgagggtggtctgaatttcttcggtgacggtacggttgtccatagcgtcgtacttggaggtgacgtacagctatcgagtgtgagcatatatcatgtcagtgatgagtcacagtattatggtatcgggagcgacgtacctgatcacgagggatcccgctattcttgagggcgacacccgttccgttctggttccggtagatgagagaggcatcgatatgcctccatcccgcctcgagagcctgagcgacaagctcggtagcgttaccctctctggctgtggcctagaagttcgcgaatgacaagtaaatacagtctaagtggtgaccacaggaggaatacacataagatgacccgcttacagtaccggtaccccaagcaggactagggatgtagtttccctgatcaagatcgaaagcaagtcaccgcatgtcagccaggacactttgcatcagattcaagagtgaacaacaaacgtcgttcagcttgtaaagggtatggccgggaaagggctgcttgtggtggtggtggtattttcccttgatgagcgattcgtcatgctggccttgagtcgagaaccaagagctcagcgcaaagactggccagaaagcgtcggtgaggatcatcttgggtgtgtctataaagagtctgctggtagagatgaaaatggtgtgctgtgaaatcctattcctgatgatatggggtcaagacacaagtaacaagtatctcatgaagtgtcgtgtcgtacaggtatccagatcgagggacgtcatcatttcacaaggtcgatttcgatcgtttcggatgcaaatttacttccgaacagaacatcatcatcgtcaaagtcgggatacagcagggggtatgtcgtcaaaaggaagccgggcaatcatgctcgtgtcgtgatatctaggtcgtgaagtcgtcacagggatggttgtagcagctccgacgtggcggcagtgtcgagtcgctatgtgtcggctgttatagcactgaagagactgtgcaaacttcgaggtagatgaccccgccttcccccggctgtccgaatcctccttcgatatcatgccgacacacctgttctcatacaatacagagtcatgagcaccttggcctatcatgctggcgagtctggtcagacccgaggctcaccggacaactccctgtcaagatcttgcccttgatcttgcccgccttgtccgccccgtatttggcaaaccaagcctcctgatccgcttttccccttggcttcttcattcccggtcctgtggtcggtaacaatccggccgcattaggcggtcttcgttccctgagcgcctgcgtcttgagcgtcgagaagagacaagctccacaggctgttggcagcgagtcgatcgcggtcgacaggtatggtagggtagaagtgcgtggcgttgagaggcgttccgatgcgagtcgtgttcgtcttcagatcgactcactgacatgcccacatggtgtgaggatggcttgtataggtggtgccaggcaaatcgggcactctacgggtcgtcgtcctcttcaacaccctctcgttcgtggcagaggggttccgggctagaccagactcacgaaaactagccaataattcctcttccggaatcccattcacggcgccatcatgctctgttccacctcctgcattctcatcgtcgtcctcgagcatgtcatccaggatcactcctgccccaaactcgatcccgtccatcacgcctaggtccgcactcgtcgcccttgccttgcccttgtccagtcgacgtcgcttgacatccccccggtccaggtcatcaggaaggtcatcaagaacgacgatggaagaatctgaagaagaccctgctcgtatgggagtcggtcttgttaacgacgtatcgacggtgtccaaactcccattcccgttcgcagctgcacggctgatcctcgtccgcggtcggacgctcccgctacgactcccactcgttcccgtagaggtcgatgcggatccatctcgattacgccgtcgaggagccatggcccgattcgcgatggtaggtcgaggaggcgaatgaggggcgagatcatccaagtcttcggtcaggtcgatcacgctgtgaccgctttgatgacgggtcactggtggcatgttaaggactcgttggctgtaggtagcggatggtcgagaatgccagggagatgtatgaacaggtcaagagaacgaggcaacgacgcttcttgacgacgtggcccagttctgttcgatgtccagtaggttcccatcttggtgcaaggttgcttagtccgaacttcggcgtcggagtcgaataccgggttgatcgatcacgtcgcctaaaaaaagtcaaaaagaaatggagatattggggatcgaacccaagacttcttcaatattaggtgatttacctgcaaatgaagcgtactaccactgtactatatccccacacgtgatgaccgaattcttaagcaaaatatgtagtttgcaagctgactgtacccggcctatgcggtcatgcaagcacgacttcacctacgcatcgagcgtatcaattccagaacaaccagacatcttacaactcgtctcttcggatcacccagattttctgggatcgcctcataaactcgttcaccagtaacatctccatcatgcctgctccagtcaccgttccctgccaggtgagtaacggtgccgctcaccgaaagtaacatcactttgcctgacgctgtaggggtgcctttccgttcgcagtacaagaccggtcgaacgctaggaaggtcagtcgctcaccggctcgtcaaggtcgagttccaatattctgtactgactcgttcatatgcttgcatcggatgcagtggtacctagtgagcttgactgcgataagatggatggtccagactccagatcaacgcgctgaaccggcattgtcgtcatctgtcttccagcgctgtcgtgaaggaggccgtccacattaccgtaagcctctatacgtccccttaatcgttctctccaagctagctcatgcaagattgattcacccgtcgatagactggagagtactttgcatgcaaggtgatcaacaaaaagctgatggccggaagggagcacatggtccgtaacgagttcggcaaatctagtcatcgattcctactgatcgtagctatcctgcatctgtcttctcttcgatcaaaacgaatctgaacccggatcaacaccctttcatggtccccgtcggacaggtccgaaacgagattgccgttctcaagcgagtctctgccggacatcccaacatttgtcgtctcgtcgaccattttgagacggctcacaacttgtacctggtctttgacctgtgtaccggtggagagctctttgacaggatctgcagcaagggaaactattacgagcggtgcgtgctcgtcctcttgacgtcgatggggaatgagagttccacgctgatgacaactgactggctttgcagagatgctgctgagatcgtaaggacaattaccagtgctgtcaagtacttgcacgacgagggtatcgtccaccgagatctcaagccggagaacctcttgttccgtagcaaggctgacgatgccgaactctgcgtcgccgatttcggagtaggttcggtacagatgcatctggaatcgagcgaaattgctaaagctaacaatccttagctctcgaggatcatggatgacaacaaattcaatgtcctaaccacgacgtgtggtaccccaggagtgagcgcaaacgagacatctcgctggcctggtgggtccagggtatcttacgctaagttcttaacgctgcacagtacatggcacccgagatcttcaggaagagtggacatggattcaaggtcgatatatgggctatcggcgttatcgcgtgagtgtcgccagagctacagggatcgagggcgttgctcacctctggcgtcgtctcgcgcagctacttcctgctctgcggatatactccgttcgaccgagagactcagtacgaggagatgcaagcaatcatccgtggtgactaccgattcgagcctgtgagtcagagtcgagtgtcttttcggcttgacaatcacgccagctgacgaggctcgggtttgctagtccgagtactgggagggtgtatccgcacaagccaaggcgtttgtcaagcgatgtctcacggttgatcctactaaccgacccacgtcggccgagatcctcgcggacgattggctccgagtcgtcggaggcgataacaaggatcctggtgtcatgacccctcgaggcggcactatggacttgctccccaacgtcaagaaggcgttcgatgccaaaaagacgtgtacgtcagcgcaaagggtatgtctacataattcgggctgacatctacccctgcgacagtccgaaaagccgtgcttggaatgatggccatgcatcgattacaagacggtgttcactcggcttcgaagaccgagactgccaggatgaaggaggaacttgcagagtataagcgagaggctgaagacgtgagtctcgatcgagatctgtagtgttgggcaagttacttatatctcgaatgtgggatgcgataggaggacgtggatcaagtcctggatgaaggcaaccaaggaccaggatcggaccgtcaacgatcgtagatcatggcggttcccatccgcatagatctgcgtttcatagtcgttgggtatcgaggctcggctgggcatgttgtacattttctactactgcgttactcgttgaccggtctcgatcggtttgttggaaacaatgatgagcgttccaggatataatccagcgccgcctcatgctggcaacttttccgcagtctaacatctcgtcctgcatcgtcctgcccgctgtcgtggacgatgatggcaagatcttcgtggtttgcctggtgcatcctagatcggaccttgccgtttgtattgcacgtcaagggtataccctcgaatatctcagggctataccacggcgaccgccagccaacagccgctcagagtgccctaaatggcactatcaggtcgtccgatctctaggccgaaagcaaccgacggttcggggtttagatcggtagaatattggtcctgactgctctttgtagcttatatgtagccagtcgtgaaaatacaaacgtaaatgacaatttgcgagttgagatctagctccattcgaataagcgcgagaagcaaaatgaaaggcaacagcttgggtccgcgatggcatgatcgatactcaagaagccacattagatacgacccagatctgaagaccctgagtcacctgattgttgcaaactctccggcgcgacctcgcacgatacgcaaacgcgctcgcgactgggcatgacggctgaaacgcggatctttcctccaccactgacctcgctagtcacgctgtaccatagatgcagaggaaactgggatgtctcaagctggtatctcggtagctgcttttcaagaaaaggagatctttgtcatgttgagaccgcggcccgtcgatgatcacgcacggagtgtgatcaggtttcctgaactcgacagccctgaccgtgtttcagatagctgcgacttctctcccaaccgagagcgatgggttgtgcctcgaatcgatagaatcgatagcaggtcatgacgtttgccttggcaaccctgtacgcatcgttttcgatgtcctggttctcagccagatgttggccaagcgctacttgattgtgctaatgaggtggtaccttagtcacgcaattaccgaagacccgtaccagtacaagcagagaagagtgatccgagtcaggacggatcaaaccgccagacgagccgcgatcagttccgaccttggagcccgtaggtggaacttagggagggattcaaggcgcaagatccaacgtccaagtagccaaatagtcggccttgcacgagtgcttggcacgccacacacggtccagatcacacgcaattcacaatgaactccctcgacttgaagactagggccaatgatgtaccttctgctgccgctgcccctatagcagctggcttgtccgccgctgcctggtgcaaatagagagtcaacaagaaaccttgcaaccttttcaccttcaccctgatgaagctcgacgtccagggcgaagggcgcgtggtgagcgctcaagaagagcgccagcccaggagatacgttctggccacgtgtcatcctggccatggggtatcttttctctcagaagttcggccacgccccccgttttcacccgtacccttgcgagcctttcccccaatgtgctgcaaagggttgctacagccaaatgcttgagagcaatgaggtgctagtctgtagatcaacatattatgcgcgacgtcaaggtcggctggggatcggccggtcgtcttgagcgtgtgagagtagacatcgacgatccgggtcagcgagggcaatgaagactactggtaccaggtcgtcgacagggtagtcacggactggaggaggatttggtcgggacggcgcagtgcgcgaagggaatcgagaaaaagtataagatcatcatcgatccgccgaagactacaactcgaaagcagaaaaccctttctacagactacatgcgagacatgatagatgaaatgtacctcccacgcaccggtcgagttcccacccaaaacaaaggggtaacgggaacccgaccaaccgcgtcctcttcagcgtttgtcaaagccggtcgactagtaaggaagtccggcccaaagagtgggtgcgtgggtggaggttcgttctggccatcgtttccccgatccgcaagacatcactggaaagtttaaactgttttacgagtagatgtgcgccgtgaatagacaatggccgtggtttggtttgtggttgtcgttgtttacgtgtttgtcgacgaggtggatggaggatagggtatggagatcgggggaaggggatgagagggagagaagatccggttcgaaccaagttgacgatgatcgacagagccgagcgtcgaggacaagctccatcgacgacgttgacgacgacaaaggttgacaaccggtggtggtcagatcctcctggtcgtcgtcgtcgtcgtcgtcgtcgatgtcgtatggactgcgtagcgctgactttggtttacatgatggtcatcaaccaggtcgaaccgggcaggattatgtgtgtgtgtgtgtgtgttggggaacaggtcaaatgagatgttgttgaacaagactagctgctgtacactcgttatatatatacctttccctccctccctctcaagtttttccatgtcgacttttcaacttttctcacgcgtcaaaagtttgggaattgaatcggagccgaactcagcagctagaagctcaacagctagcagaggttcatcttgtgaacaaacttggactctactttaccctatcacaagtcgagatcaaccctgcacagctcaaactcacagccagatattgaacagtcgccgacgatctatcgagatggcgtccgatcaaaggtccagtcgggcccctatggtcaagaacagggtcagtccgcgtaccgactcgcaaaagatgaggtgtcaacgagctgatcactcgattgctttccccacacacaggctcccgccaagattcaggtcagtccgggctcgtcttggagtacattaccgagtccgctcagcttaccattcactccttcccgcccccttgccagatcacggccgagcaactcttgcgcgaagctcaagaacgtcaggaagcccccttccgagctcccggacagaacattaccgacctcgaagaactctccgagtaccaaggtcgaaaacgtaaagaattcgaagaacgtatccggtactctcgttcggccttgcgagaatggatgaagtacgcttcgtgggaagccgggcagaacgaattcgagcgggcgaggagcgtgttcgaacgagcgttggatgtggatcctagggcggtggaattgtggttgaggtacgccgacgtcgagctgaaggcgaggaacgtgaatcacgcgaggaacgtgtacgatcgggccgtcaccctgttgccccgagtagataccgtgagtgttctggcaacgcaggacgttcatcgtggttgaaacccgtccgtctgattgactggatttcgccttgcctaccctttcgtgccgcgtcatagctctggtacaagtacgtctacctggaagaacttttgttgaacgttcccggagctcgacaagtgtttgaacgatggatgacatgggaaccggatgacaaggtgcgttcatcgtgattatccctcgaatctctcaccccgctcacccttcaccccgacttctgaacctcgcctgcaggcctggcaagcctacatcaagctggaagaacggtacaacgaacaaacacgcgcttcggccttgtacgaacgctggatcgcctgtcgtccgatccccaagaactgggtcacctggtccaaattcgaggaagatcggggcgaagtcgacaaggctcgcgaggtctttcagacggccttgaagttcttcggggacgccgaggaggacgtcgaaaaggctcagggtgtgttcggggcgtttgcgaggatggagaccaggttgaaagagtttgagagggcgaggacgatttacaaggtgcgtacgagggaaccaaatagaggccgttttctgaatcgatagacgagactgacacctcctggggttctttgtcctttcgtcgattagtacgctctggctcgattgccccgatcgaaatcggccaaccgtgagtcattcgccccggtatctcgctcgaaccgttcgaggttattgacatccggttcacttgtgcagtctatacggcctacactcgattcgaaaagcaacgtgcgtcatcgatcagctcggtaaccccatatgtctctgacctacctttacgctccctctctcgcagacggcgatcgatccggtgttgaactcaccgtgctcggtaaacgacgaatacagtacgaggaagaactcgcacatgatcccaccaactatgacgcttggttctcgctcgcccggctggaagaggacgcttaccggagtgaccgagatgagagcgaggatggagagggggcagggccgggtagggtcagggagacgtatgagagggcggtggccaacgtgcctccttcgagcgaaaagaggtgggtcattgcggcgtgcgtcgtgggaggttggcgatgagattggtagctgattccgctgcgtgctgtcggcttgacaggttctggaggcggtatatcgtgagtgtccagcgcaggagcgatgtatggtgctcgttctgacgcagtgtgctttttctacacccttccttgtcgcacagtaccgtaagtccccctttacctcatccgtttctctcggccagtctctcacgctacgactctcttgcacagtctggctgcaatacgccgctttcgaggagatcgacaccgaggactacgagcgcgctcgagacgtctacaaggcggccgtcaagctggtccctcataaacagttcacctttgccaagctctgggccgcatacgccgcgttcgaggtccgaaggctcgacgtcgttaccgctcgaaagatctttggtgccgccatcggaatgtgccccaagccgaaactctttgtcaagtacatcgagatggaaattcagttgagagagtttgatcgatgtagaactctgtaccagaaattcctcgaggtgagtcgtagtactgtcaggcaaacaatcagatcatcgtcgttgactgatgtcatccgcttgacagtacgacccatcactcggccaagcctggatccagtggaccgaactcgagacttcattgggcgatgtcgaccgtgcccgcggtatctacgagctggctgtgcagcaggctctcgacatgcccgagctggtctggaaggtgagcctcgagctgaaagctctagtcagagcaaccctgattcggtttgacatcacaggcattcattgacttcgaggctgggcaaggcgagcgagaacgaacgaggatcctgtacgagaggctcctggagaggaccgctcatgtcaaggtgcgcttcttgaaaacgataggctttctcgggagaatgatgctgagactcgccctgtttctcaggtcttcatctcgtacgccctcatggaggccagcaagatcggtggcagcgaagaggacgacgaagccgaagccgacgcggctcaggtcgaagccgagatcgaaggggacactggcgatgcgtcaaaggcccgcgcggtgttcgagcgtgggtacaagacgctcaaagaacgaggcgaaaaggaagacgtgagttggctcctcgaaatcgacgggagagtaaatcctgacccgatgcgatacatccgtagcgagtggttcttctggaagcctggaaatctttcgaggaagagcaaggttcggcagaggacgtgcagaaggtgcaagagatgatgcccaaggtcatgaagaagtggcgtcaagccgaagacggcagtgggctggaagagtgtgagtccaaaccgcgctggaatacgactggccacgaaactgacattctctacgatcctaccttagactgggacatggtctttgccgacgacgagaaagaggccaaccctgccagtttcaaattcttccaggctgctcaggaatggagccggaaccgtggcaacttgggattggatgacgatgatgatgatgacgatagcagcgacgatgatgacgacgacgaataggactggccacgaattcggagctcatgtaacgtcaaacaacatgctatatcgatatggccaacggaatgagattattcgcaagcattgttcgaccgcatctcatagatacatcgcagatcagttgtttgatccgcctagagcccgttgccttaacgaccattctgtggcgcgtcctaccgtcgggcgattcatcctcaatcgatttttagctcagcgtccgtggaaaatctgaaagacggaagaagcgggccactccttctcgattgtcttctcttcttgatgcagggtaattgcccaaccaagtagaccactactatgcccaaacccccagctacgacaaccgcgcatgtgacctccttccatctcaagcgctttccccatgccaactcttccgcgttgggctcgcgatacgtgggggctgtctctgaagactcgagtcgacgtagcatgtcatccttgctcagcgtctccgcctcggacccgttctccggtaggcgtacaaagactccagcctcacgaacggcttcaccatcctttaacatctcctggaccagcgatccggcgggctcagcagtactggaagcttcagacgggtcggcgctcgagatggacacacgaatcgtctcgcttgtggtgatcgggtcgtcgtccacaatccttttaatgtgttccataagtaaatcatcgttatattccgttccggaatacgtagtcccctcggattgcgtaggaatggctgggagctcagagctagtcccagtggcaacgaaggagtcaatactcgaatgcagatgctcaatagccgtggcagatgagtagtgaggaacgctcaagatagcaagtggcgccatgatgaacagcagcttggtattcttcatatccaggagaatgacccagagtaactgaacaagcgaagggataatctggatcgcccgcaatccattatgaatatacaaacaagcggcatggactgagccggaacttgaaatgcatacatcaacaaaggagtcgtcttacgatataggcaatgccatatggcgttatttttcattgcatcgccagtgcgtttgcacgggctaagctaccgcctgggagaaccagcctgtcgacgaagtactgtatcgtctgtctactgggtcacgcgcataggttgtggataggcacccaatcctaccggctaacccaagggaacagaatcaagcatgatgtcctataccggtcatgtgcaagggagtctctctcggctcactcctttatgcttctcgaatgccgcgagtctggctctcgggtcgacagcctgcgctaaaggaggacgtgatcatgtgacacctgtatccggctcataggggttccgcgtgagacgaagtgaccgacattagtcgacgctctcttagcactttaccagatccttgatttagctcacaccttgtagggagtctcatcgctcccattgtgagcagagtcaaagaagagggcggcaggtatcgatctgagaggaattctaaaatttaccttaatcactgatgacctcaagctcttatcgcgatgcaagttgattagatcaggctaacatgcggcacgcggagttgtaactgcagtccgagaaatgaacagggatgcaatattcacgccgctcctccgcaatttgtcctccaacagtccttgagttggatcatcagcaaaagtcgaaggggcagaccgaaatgatcacggtcgaaacaaatcctaaacaaaggaaggcctgtgacagcttgtacgccagggaatgcgctgactgagcggccagaaatagctcgtgtcgtgttcatatggttgtacaagacaatgtctagtgagagtcgggcgtctgtaaaatgtccttaggttgttcgtcatgtcataaaagtaggccgatccgctagttaaaggcgtcatgggcgtcggagatgaggcggtctccatcgaatgcggagtacatcaaagatgtcttgctcggtcttggacgcaacaatggtacctggtgagggaccatggagtcagtaaggcgatcaaaatccccccaccccccggttttgcgagccgaatgatcgtcaccttccgtttgcttgactcgattcgcatctcgtaagactcccttgtagagtcctcgctgattcagggaataaccttgacgattcgcgtagtagcgcagagagcgattgaactggacatttcaacagcaccgtcagcacatgactttaccgctcatcgagatacgatcggctttactctatcattgccagtgaagtaaatcagagcctgtgcatttattgtgttcaatcgatgtctcgaacaggctttttctggagaactcacggcaccatattgctcgtgcggcgtagcgagaatatctgcatcaagacgcggtcagccgaaagcgttgattccgagggttggactactaaccaattcttcgcagcttcgatctgggtgatattcgtccggtacccatccacttgcattccagagcatcccaattgctaggcgtgctgacctgaatcatgcagcaggtcaacacagagctttataagtccaccctagcacttaccgtatggcaaatgatgcctcgattgaccaactccttgaccaatttcaagatcacccctagaagacaaatacgatgagcttacgctccttgctgacatgcgtggcaatcacagacgcccaccagcatgagagattccatcactcgggtcgcgcgagatcaagatgtcaactggacggaaccgcatgagcttagaaaatcgatcctgtcagcagtcgcttacgatcgccagaagtttcctctcctcgtcgataagaccccattggatcgatctgcaactttggttcgatttccagagctaggcagaatagaaaggtgaatcacgttcgacttttcttcagaaagcggcaactcacccgcccgcttgatgctctcgaacagcgcagagacctcgtctcgtggtattctgctgggacattgatcagtcaacacgcacacaatcgatttgacaggcgcatcgacttgcctctcgttcaagtcgtcgtagaattccagtccaaactgcgcagccatctgagtatcggcgatgaagctggtctagtgcatggctcaccttgtggccatccgtgagtccgtactttttcggttcatctttcagatcttgcaagctatcatgtcatgcgtcagcactgcggcttgaaaagtagcctggtggccacttacgtccgcgcccctctcgcgactaggctatgagccaaggccggtccgacgccgtagatcttgccaaacgcggccacagctctgctctccggcgtgtcctcgtatacagctctgattgttcggccataatcgatgtattcctgaatctgaatggggagacgatatcagcgtggggtgtggaggaatgaaggcatgggacttgctctctcggccatctgtgctccgatgcctttgacctcttgagcttgttttcccgattctatgcgataaggcacgtctgtcgaaacgctcgatgagtcccagtcatcatcctatgcggcgaatcgcggctcacttcgtacgatgtttgccactttttgatacgactctcgctgaaacttgttcttgtgaagggcatctcgatataatttggcgagttcctcgatggcctgagcaatgtcctcgttgggaccgtcccgtccgatcttgccatcgtgatcttgctgagctttatgaggcccgtcggttgtctatacgcgaaggcatctgtcggcaatctcatgcaggtaagatccctgcggacactcacctcttcccgctttttgtgagcctgcctacgtgcggctgcacgcaatgcctgcccctttgctgcgcggtgatcaagatcttcgtcgtccgttccctcgtcgctcccttgatcgttcgatttcttgccatctggaacgttcgtcttcatcggctcctatcgacgacacccaatatgagtctatccagatctgaatacgggcatgcagctcacctcctcatcctccgagatatccaccgtgcccatcttgacgcccatgatgatctcgtccagtggatccgccgggacgcccggttccaacccgaacctccgcttgtagatgtcctcctccctctcctcgcccggatccagagcgggctggacggggatgtactcttccatccgttgaagggaacgggaagcttgggtgtccgagtctgtcggggtgatttccctcgtactaccaggcgtgaatattagggagatgttcggtgagcgaaaaaccaagccagggtccacgaagtgcggacggggactcgccattttgtcctcttcccgaccctgatagcttccactgcgctcaattcgcgtttcttgctcgtcatgagcatcgtccctgggcctggtccggctaacccgctcaacgtcggtcgtttgagcaagtacggctccaggggctgtaacaccctcgtctgtccatcgtacccccgcccagtagactcgtgggtcagcctctctaatgcaggccgagcccttacgatccgatcggtacgactcacccggatagacgtcgagacccattcatagctgacgcccttgacgaaggggtcgatctctttcctactcccgatccctaggaacttgagaaaggcgggttcgtcgacgtccgggtcggccacgatgtgggtgacggtgggatcgtaacgtatgacgggggtaccgccatgtagcaagatctgcaagacggggaacgaggtaaacggacgaggtggctctgagactgaacgaacgcgtgggcttaccaagttccacttgtctctcagactgttgaacgccttttgactcatgacgatccctacgacacacccttcaaagaccttgctcctcgagcctctcatcttgttcttttcttccctctttctgaacttgacgtgatcttcgaggagtttgatcatggccgcgctgggtttagggaggtttgggaagaaggaagttgatcgggagaatggatcgtccgggtcgacattcaggtcggggagggtatgagatctctctggaatgggaaggagttgaggtggtagatgcgaatgaattgtgggcaatgggtctgtcgtccgtttttgcaattgcgaaggtggtctgacgacctggacgctcgaggatgattcgaccaggtcgatcacttcttgtcccgccatgtcctttcctgacttctctgtatcatcggcgtccttccattgatccatcagacattcaatcgtactctgatcatactccttcctctcttcccgggtctctcttagatcctgcccatcctggtcgaatcgtcggtaccccgtcatcatcccgatcggtcgcgcgtttcgagcgtcgtctgagaacagctgcggtcctcctcgggctttcgacgaggacatcctcgagtggtagtgttcgaagccgaacttgacatgctacgatgagaacggtgatcacaagcttgagacggtcggtgagtgagtagcaattccaagtagaacttgaacactcgacatatttcgattccattccaagaaggattcgtcatttttctccaaagatggcgactttgtaaacaaaacaaacaacaacaaactaggtggccaggtggtcgaaacagcaaagtcgtgatggtttatgcagggtatcatcataggtcactcatacatcgtagctatcatcgtggtcatcgtcgtcgtcgtcgccgtcgtcgtcgctgtcgtcgtcgtcgtcgtcgtcattcgtagtagcagagggagagaagaggaagactttggaaccgcacacctcgtcggccggcctctctgcatcacctcccactcccaacatcctcgaccatcttctcgtcctcgtcatccgaatcgaccgaccctccgtccggattcaccgcgtcttccgggtcagacgctccttcactcccatcatcgctctcttcgtcgctctcgctcgaaggccctgacgagggagggatgggaactccctgactcggatccccggccagcgggttgttcagggtcggggtcgcaaacttggccaccccggcgttgttctcggtgtcgacggcggcggcggagtcatcactttgccctgcgagtcgttttcccaacaagtcgtccgcatcgccatcctcgtcctcttcgttggggatatccacgtggaacaactttctcctgcccctgaccgatttacccctgccgtttcgaccggcaccgatcatgcctctcatcgacccggacgacgtgcccctcttgacggcagtagatggtccgcccgatccagatgcggcgacaagacgatctctcctgaaatccccatcctcatcgtcgtcgtcgtcctcctgatcctctacatccgcgtcctgctcatcatcctctcgcttgctggccaccttgaccgacccagacctcttcaacccgaccgtggcgttcgggatatggtcctgcttctcagcggtgggccgaggcggctcggatttgggttcgggttcgtcccacgggatgacgagcagagattccgccatcagcccgtaccgcctgatcaacgccaagaaccgagcgtacagcgcgttttccgcctacaagaccgacgtccggcggttcgccacccagatcagcttctacgctatgtctctctggctcgcgacgacgcccacctcgcaaatctcaaacacctctcgatggtgaaaccaagcgtgtccaaacaccctcgagatcctcctcgcttgttggccgaaatacctttccgagccggccttgatcgagagtctacgaggcggggtccagagcgggatcaatcgggtctggtcttctgctcacgaggaggacgagtacgcggcgactcacctggaagggaacgcctgtgccgagttccacagtgctgtatgttggtccaccctaccaacccgaaccgactcgtcaatcgactgcattcattctcgaacactcgtccgacactcacgtatggaggatataatcgatcgctgagcatccctatccgacccgcgcgaacggcgatcgacggatgacgacaccctcatcagcttcccagcatcaaactcccgtcttcaacgacccacgaacacgcacctcgctactcatccctccttgtccctgtccctgcccctggatccccgcgacagatcccgcgggatgggctacgcagaggtagacccactcggccgctttcatctctgggcaagtctggcgtgagcagatggggaggagcgaggtgaggagtggggtgaggtcttgtggtagtcggctgtgtcgatgtcgttacaggtacgtccgagggcgatgcgaagagatggtcgagggtgatgacaggaagtgaacgacgaagagggaagaggagagagacggtgtgaaagggtatcagagtcagccccgatgcccgaccacacccaagagagagctgcattgtcagacctaccgaagatgttcgtatacccactgagaccgggattccagagtcaagatgagtgatcagcctttatcccgccggttcctcgatcgaactaggggtggagacgagatttttccaccgagggccacagtcggactcggcggaagcaccgatcccgggccgttgggaagaaaggggatcacgctggacgatgaatgggtatcgatgaactcacgagatcgacctctttcttccccgcaccttcccccttcggcgaacccgttccttccctatcttcctcgacctcttccccgaccccaccgccgggtatcgtactcgccggcatcttgacgatccgatcgacgtctttcgggtctttttggatgaggagcgctaggtattctgccatctggaatgaactgtcgatgagcgtgtaggagggtgggatggacgggtggtcggtcggtgaggatgcgggtgaggatttagggtttggggaggtggtgttggtcgtctttcgtgtcgcatgacgtccgggtatggtaggaacaggcgttcgaggataggtagaagatcgggtgtaggtgtgtgtttagcttagctttacgggcctgcatctaggtcgacctaggtcagaggccggactcacgatcatcttgctcccctttttcaatctcaacggactaggttgtttcccctgttgtcgaacggatgtcgtactactcgaatttgtcgggaaagctatcgatgacgacaacgacgacgatgttgtttttgatgaagatgacgattcctgcgggacgacgatcatctcgtccgtctatggtcgttccgatacgggaattcgagcgaagtgtgtagtttgatctagagtacgatcctagctgcttgttaatgggatcgtggtgattgctacggtgttaatacgaggtcgtagtggatgactatatcaccatcaccatcgtgatcatggtcgagtcggttatcgttccaatttcccaacttttatcgcgtgagaaagcgaaagaaattcaaaaaaaaaacactcgaccgagacgttgaaaaaggggaaaatagacttggtcacttcatcatcatcatcataccattggtactatgacaattagcacctacataccattcacatcgcacccgtcgtcatgtctcattcaacattgataacgtcgtccaccaggctgccctcattgaggacgggtgagtcgaacgacggggtcgcgacgagaaggagatcaaatctgacgcgacacgacgacctatgctctgacttgcagccatcatcccatccctcctcaactgtacagcctcatcatcaaccgcatcctcctccacgtcgacgtcgtcgtccgcatcgcgatccttgcacaccacgtcgaccacgctcgagtcaaagcgcaagatcgtcgcccgtcagaaaaaggccaagaacctctcgctccgttcggaacgttctcgtcaagatgttcaaggcctcgtcgaccccgtcatgggcgacctccgacccgagaccaagatgggcggtttttttgctcgtcagcaacagcagcagggtggcaggaacgccgggagcgccgccgacgtcgacgccgaggtgggagccaagtacgagcgtagtctattgaaaaaagtcgtcctcgaccggacctcgatctggttctcccagcctcctcaatatccatcccaatacacctcatccaactctcaattcccatcccccacccacccttcaacttactctcaatccctctcctccaccgcggaccaagacctcgtctttaaacgtctccccgaatccgtgttatccaacctccccgccgcgctcgctgtgaaacagggcaagacgcccaccccttccgagagccgggcgtacgaggaacagttgacggtagaggccaagatgaacgaacaggtcatgcgggtgttggatctcaggaacgccgatgccaaggggatcaagaaggagaatgtgcgtaggatcgtcgaagtctttggcggggacctgaacaacactggggccgacgctgcatcctcctcctcggccgccgatgtcgcttctgacaccgccgctggagttcttccccggatgaacaccggccacccgaccgtcacctctgccatccttacacaccgtatccacctcctctccacccacttctcccaaaacccgcgtgacgtgcacaacaagaaacgtctccgcgagctcgtccaccagcgggccaaggtgttgagttattacaagcggcgcgtggggagacggggcggggagggcgaaggcgcgtatttgggcttgttggaaaagttggggttggacaggaggggggtcgagggcgagttgatcgtcaggtgatagcgtggcgttacggaatagggatattagtgtgagtacctcgttccgctgtcggcttatttcgattcggttcggtctggttcggactggatacccctatccccctttccttttccttccgagttcctcccgatcctccttcattccatgtgctatcccccgacactacacgaatgcgcagccgaccgcctcgccacacgacaagacgatgacccaatgatgcgaacaaaaataccaaaacactgatttaatgagtctgatatccaaaacgtgcccccctgaccgggggcggcgttctttggtggggaagactactttaatgtctgagggttatctgatggtggatggcgtgcaaacaagcgagagatgggaccggaggggatggatacggcaatatctggggatcacgctaggcgatattcaaatgctggagctcgagctgatatggtcatttcgtcttcttcacgcaatagtacgaatgaaagaaaatagtcatgcatgggaaatctgcatgaaaatcaagcaacgacaagggtcatcaacgaagacctagcaagcaatgagagaaagggcggagaaagggctagacgttcttcaatctgttataccatatccacgaatgcatattgcatctttcttatcacgcctttagtctttacgtgtgatgcgctcatatcgccgtcatcccaaatatgactttaaaacgagacgacaaaggaatactcttgcaaatttcaggcgcacttttttctgctgcgtccgcgccaatcgatataaggcgtgggttgcggtcttgcaatctcatgctccagcgatctcaggcagatctggaaatcgatctttcgtaaactgttgatgaccattcaggtcggcctacttgtctgctcaaaccgatggacgacgaatggtcagatgctttatacgaacaccagggggcctgcagcctgtactgctttgcccacggctgtactactgaaagtcccatcgatcacgacgaagatggaaccttgccgccgaactttacatgcttttcgaaagaggatcccgtcgattataaggacaccgcgtcgaacacactggtcccgaccgcacggcaaggttcgctatcggcccttgacattcataaaataggcatcgtcgagtcgaagtcaagtcaagagagtggcgagcagtcagatgaccattctatcggagtggaaacgagtcccggtactcaaaagctgtcgcggtcgagatcgaacaccggcgcgtcagtcaggtctaccgtcggtttgaaccccatacccgatcaagacttaccccaaggaaaatgcataaatagtctgggagcctgcgttttcaataacaataatactgcaataagcaccgattacatgaacgcggcacagctcatctacaaggcggccacaggcaaggatctcggatggacactattcagctgtaacatcaatgaagagatcagcacgagcgaagccctaaaagaaatacccatatccaaggaaggatgaaggaaagcagggagctacatgaccaggtttcgtcgagagatcatgttgctgcatgaaagttgcccaactttaatctgggcaggacaaagacaagatacagctaagatacaggggagtcgaggcactctcgaatcggcgtatggtaagatcagatttttagtcgatcggctcgagccggtcccgaacgtgccatcgttcgagtcggggcgggatgggagatcagccagtgtagtatccgacatgtcaagtctgtaagcgagaattaagtctgcaatacgacactacaccgaatgccagaactgtcactcggcgtcgcctcagggcgtggtccgtctaagaacgcagaatcccaaaagcgtgcttgagtttgtcaagcggcgcttccatggcgttccgtgttgcaattttttgagacagacgagacaagctttggtggagcatagtgagctatgagccgcctgtcgctgcagaatactgagtgacaaccggtggtcgcatgggcatggcccgcggcactgaatgctgcgaacagatcaatgaatccaaaaccgacccacatcacttgtcagtagtacacgcaccctgctgatgacttgttagagtaaaatcgaattcgttaaaggaggacctcctttcgcaccttttcggatggcgataccatgagcactggactgtataagacttcggtagttggtgctcagtctcatccgtcactaaaaggcctagtcgtagaggaaagagtatcgctgcagcttcgtaagattccatacagcacgagtggtataacatggaattgaacccgatggaagtgacggcaatcattgctttggtggcattgtccgaaggcagagaattcggtgagactgcccggctcgctgcatcttccgtgctcacggaggattcgatctggacaagagctacaccgtcagcagagacagctgagggtgaagcattgccggtgtcccgatccgagatcctctttcagtcatgtacaacaggcgttggcagcgcatcgaaccggacagtggttgcttacaacgccaacgttagcattccaggttcatatggtccgtcatcgattccgtacatgaacacctccttaggagaatcaaaaagctcttttacccattccggcacgaaaccaaatgaatcttcacaatttgaggatattgagcccttgaatcgctgtgcggagcaatcactcccggatccgggtggatatctcatcactgcccaatcgttctatcgagccatttaccacaagcgcctagactgggagttttttcagtgtgatcttgagaggaattttgttcaagaagcggacgccttcaagaaaaatctaaggttcactactcgacagtgcggtgtggtcaggatcttcatgtcgacatttagaagggcactttttcacaaataccataacgggtgtccggccgttcaatgtgctcatggaccccacaggtcgcctacaagagtaacacaccaggatttagaagcagctttccagggggttcagcctctgctaagaccgctcccggtggaagttgagctgggggtcgatcgacgtgcagggtgaacagggtggcgtttcggcgagagatgagttttgagatgtactggacgatccatcggagaacgagagccttgttcagttgtcaggcatatttgtgtcccaggtacaaaacaaggaaactaagtcatgcatgaggtattggtggtcgtgattggagtcgggccgcagcggaagggagaacctttatcagccctgaatatcgagcacgcgataaatgcatttataaacgatccacgaagtactcgacgcgacatctggtagacgcgtgctgcagtggcttgctggaatccttttatcggagcgtcatggtagatcttgatgatatgccgaccgacactttgctaatgtggagatataagctctcaaggatatctagctgaaaattccgattctgcgggttgtcgctgtcttcattaccgcatttcgcaagtgagacacaaactcgctcaccacattgtcgcggaaatatgagcaacgccttatcgagcatcggatccgacgacaccaagccaacgctggaagatgcaagtacattgtgccttttcgccctcagtcgcaacactgggaactccgaggattcacgcggcctaagtagacgtgaccgcgaaatctcagtggatgcaaggacgaccgttcacgatattgcggtattgctggggttgattcccgatgaccatcagcttccactcctcgtgccgctgtgtttaggttacctccaacagcgagagtgggatgagagcaacaagtctaggattcgcgtgttcttagagctgctgaatgagtatagctgcttggcggttggctgtccaggtcctaggggcgaaatgcagatcccgccggaaggatccttgagagaagtctgcagaaatgccagtcaggctgtccaagcaatcaaggcaggcgaaaacagaaattcgcaaaacaatagatacaacgaagaatctgacagatcatctgcaggcggtgccccaagctgtaccgatgagatagcggaaacgtggctgtcaggtgctgccacatcaagcgcgtcagaagcggttccttattggctacaagatctacctggctcgagttcagttgttacagaagcgcccggagaactacgttacgcagggctttgtaaaggagaccattggacatgcccgtgcgagcccgcttgtaggttcgaattggagcctggtcacagaaatctgttcgccgacctacatctcgccttgaccggcacaccgatttcgacgtggaattttttgcggatggacgatatgatctggaaacagctattcctgaggacccctatgaatagatgcgaagaagacgaccagactgccatacaaaggttttttgagctcacccgttgggtcatcttgaaacggcattatagcgggcgctgtaccgcgctgcgaggtgtagtccaagacatgtccgttttcgtgccaaaccccaagaccagacacgtgacgagggatgtcgcatcactgtaccggcgagtaacagacatcagaaacaggttacgtttctgaggaagcgaagcgggggaccccgggtcgatcaaccgtttcagtcagtcgagcagtggggaatgataaagactgtccgaggttcgtcatatgaaaacattaaggcatataaaacagcttaggaaatcgcagttgaccgtgggtcaaatccttcccttagtatcttcagcctgtaaacgctgaggaagtgctccatttcgttgtcgatccctgctagcgataaatgtgtcccatatcgtttgccttgaatcaacctgtttccattcacacgaaaagtacatcttgcgcttccgaaaaaggttgattgatgctatataatcgctattgtgacgtcctactgactacagggccgtcaagatgccatatggcgacactggggtcggccaaaatgattattcgactcgatcctttgtgtaaacgatgattatgtcatttgtatgcagcatgtacgccacaggaagcagtacccttaccatcagagtccaaagagaaaatagaggagaagcgatcctttgttcgaacaacgtgctcgactaatttgattttcattgttgagtaccctctcgaccgaggatataacatgcatcgatctgctggatcacgaatgcttttctctgcgagtctataaatgacctatactaccgtcagcctttgttctaacagaatcccaccagcaagatgagcagcagcgtggcaggatctgacccggaaaccgagagagatgccgctttgacactggtaacgcttgcgggatccttgaccgatgtttcggacgcggtctctggcgaaggcgatcgcccctacttggatgtcgtgcagctgatctataagattgcgcatctcataaaattgccttgcgacaatatgggactggtcgatctggtgcaagagattctttggggactgagtcgaactatggtcaaacaaacaggagaaatcgagtatcatacgtttcctaatggcttgcgaaaagcacggtcgtatagcctcccgactgccagctctttgggggtcggacaccttgccagaatccggatccctacgtgatctccacctacgtgctaacgaggcagtggaatcgttggctgagaagcaaagagagaccgaaatcagttttcagaccgtgccgcccaccgagcagctgtctccctgtttgacaacgccgagcatgtcgacaacgagggtcactctaccatcgtagcagatgactctgtcaggtggggattccacctcgagatcgctcgcgcgaagtgcatctacactctcattgctaggttcagcagagcatacaggtttcatcgctggacatctcgcgtgtctacatggcttggatcgttgtagagttaagacaactaactcagcgatcggtaattggaacgcatacgtcgaagctgcacgatttttctgcaagggggtcgcgaactatgatctatattggtcaatattcagcatcagtctcgaagaatacttccctggtattcagggcgaacaaagcgatcttcgaggaaggaaggtaactgaatacatgtcgcgatttcggtctatccttttctttcacgtacatgagcaatgcgcgacggctacatgggccgtccacctcggccgaagacctcgcgagcagtgttacatgcactcgatgtggcatacggcgcaaccataaaacgtctacctcttgacattcgtattcttcccgcgaatgctggtgaagattccgattgtgctgggcttttggattattgccccgaagggtcaactaaagctatagttctctcggctgggcatctggggttgttcgactggatcattttcaacctcactgggaaaccggttttgcagtggaagctctaccatagcgacccaacggactggaacaggctaccctcttcccatccattcagacgattgtcaagcgataatcaagcgacactacatggattcttggtactagcgcgtcggttgatcttgatactgcataatcgagggagaatgccgcacggtcgtagaattccgacgccacttggaaaatgatgagggtaggactgatcggcctcgggacgaattggaggctctgtacaggaaggctctcgaaatcgagcagcacgtgtcgcaatcaggcgacaccgagtaatatgagtgacatgtataggtaccgctgtcttgtatcaatcgcaatcgaatccagttggacttcagggatcatgatgtggctattgcagcaccaggtcgagagagctttgtcatcgtcaagcactatgaacggatgtgccattctttgtatatcatatcgtgaagtatcacgcttggagagtctcggccgcattcagcccagcaccggcaaggatattgcttgcattattttcagatcacccattagagcatgcacacagttacttttcctgttttgaggcgctcgatccgccagaacgggcgcgactgtggtatcgcgtgacatccgcgaggcgtactcgtgggcggaatgctcttcctttgtgcgacttctccaatcgatcagggttctcagcactataataagctgattcatagcgagctagtatattgtattcgcatagactgatacatgaagtttaatattcaggattatcagtcacacacagcaattcatgctacaggatacgagtgacgaagctgaccggtatggccgatccattttttccacgggacccgacaagcgaggatctttccaaggcttggatgggaacactcgcacacaatcggaaccttgcagtgagtgtagggaacatgatcgctgtaccggccaattcttgtgactttacttccgccaccggaatcgggtccgatgtggagagtgcccaccagataatacaaccttcctctatatcagaacccatgctcatattgaccacttggcttctgaagcgttcttctcggagccgttcaaggatggggactggtgatgtcttacaacgtatactgacgctgcgtgatgatgagatatcgagaccggaagatcattccggaacgaagaaggctttcacggcgttcttcatggcgatcaaagagcggctctcaaattcagcccagagcaacgttacgaatgacagcgatgggccatagacatcagatgaagagctgaaaacactatttgaagtggcgaattggcacaagaagcgcattcaggagcaggagcgggaacgatggagaaacctatctttacgcgactacgcccctacctccgttcagtccatactgccgaaccatccgcggagccaagccaataccgcaacctatttcgatcgacctggaagctttcgcccggtattgagcaattcaaggaatgattcaaagatcagaaagacccggaccgatcgatcaggaattggccattcagtgaattgggttcagaccacagtgacagcagggtcggaaggtagtgagaccttctttaacaagttcagctgcactgacgacgattcatacaagtacccgacaatagatggacagttccatgacttaagtaatctatcttggcctggctttcgtgggagcgccgacaactaccgtcttgaagaacaacctccgatctcggcgtctcgcacggaaacccgctttttttaacaacaacctccaacgttgagcgaatatgccacgagccagatcatgacgtcgatagggagtgagtacatgcgacgtgaattttactgtttattcgatggtttgaaacttgtctgagtatcaagcgaacgtccagacccctggtcgaacatctcgacacgtggaacaaagtcgcttgggaaaagaaaaagatcgccatgaatgagtgagactcggcttggatagtcaatgcatttccacacccctccgacgattccaggtcccccgcatggtctctgataaggcagctgtggaccggtaccgactccgtccagagcctggaacctcaataccggaagcttttctcgattctctgcaagggtcagatcaaagataggtggacctacaggcagctgtttctcgcgcacgacgatatgatctcgtataccaacggttgtatcgatagattagagccagacgcaggacgctttgcgtcaggatcattcatttatggtacctacgagctataatctcggaaattatgctctgactgcgcgccttacgtcaatgagatatttgtttcatccaaagtttcaggtacacaacggaggcgacagttgttcctttgtaaagtattggatgcgcttgacctttcgtctctttatagttggcgaggcaagatgcaggtgaaatgattggcttttcgcttggcctggcctggctcgtaatgtcgaagtgaaccacagagtgattctccgcctcggacagcatccatactgctacagaatcatggaccaaagcttcactaatgctacgttcaccttcaactctgcgaattccgacttgaccggaggtatgaccatccccaattcgacaacatcatcgagcaacactggatgccatttggcaggctttcacacgaattgtatgggccaaaagtcgacatgtcatcctaacattcctccctgcaggggtaccccggagcaccctcacgaaaatatcacgacgggaatgttgcaactgctggatatggtatgggtgtactattctgacataagaatgccagccaacgtgtgtgaacagattgacttgtcggttgacttgattaaggttggcaccgctccccaggaaatcatacaagcgcaactgtggtttttgaaaagtttgcgtggcactctaaaaacccatctatcgtgctgcagtacgcgctgcggacatgatggccactgctacacgatcggcaagaacttatcagggactaaaggtcattcctctctcctcgtagcatatgaggaggccaggcgatttatgggtatcccgattgacaactgggaagacgacccgccaggttctgggacagccggaagcgagggttcagaggtgtcgttcgtgacaagcctagacatgggatcaaccgaggacatcgttgactggacacgcttcccctcgaatcacagatactggcaagagatcacgttttgcaacgagcacctgccggaacagcggtgcgaggggaaatttttgcaatgccgtcatggattggaaaatgcggtctcgctatggccacccaaatacgctcagctagcttcgtggctctcctccagttggggtaaagcagaactggattggacgttcttgtccgacactctggacacgcaaaagatgcgcgacctgttccttcgatccgctcacgaaaatgcacagaatatagcgccattcttttggtattgtcgcttgctatcgaaatggacccatcgcgacggctcctgtcctgaatggaagaatcgtgctgggcaactaaaattccgaattcaggctttgagcggcgaggaggcatacaaacgcgttttcgcaataccatcggccgactggcaggatggtaaagggcctgttccctgtacaaagtgaacgacccgatgatcatgacaaggtgaactctccctactgagaattcgatgatacagaattaccgcccatacatcgttgtagagatgatattgccgcgtgctttccgacagctctcatttcgcattggatacctagcaataatatgactttacgttttgccattttgaagcttagagtatgaaatatcgcgagagtgattgctacagctactgtcagtgtaccgaacacctcagataaggactaaagtacgattggattgccattcaaagtctcacgccggatgccgcatgcccggtccgcaaggatgagaccgttagcgccgcctttttgcgcatgctctgcacagctcagaagttgcacacccgctgaataacgagcgggtccgcaagcgtacccgcgctcagacagaaagacagctatggaaaaatccggcagttaccggccaagcaactgtggcggaagaagctaacacagtcgagtcctggcctgtcagcgtcgcagggaaaggatgtctagatcaaggcaagcgcctttacagcaattcgggaagttgtcgtctggactatctcatacgggaatatcatttttgcccgggaatctcgtttggaatctggtgcgtgaactcatgagcgtatttctcgtcatcagacctgaaagctggatcgtgcacacgatcgactcacacagcacaatattacaatcacctgctcacttgagcgaaggcgtcatcgcttgacgatcgagtcaggctgtgaagcttggtacaaccaaaccaccacaggatgggaggatgcactcgcttcttcattttgatgaatggccgctatgtatgaattcctttcatcctgcctaggaaccatgtccttcctcgcgcgatcgcgtcgatatggatctggttatccctagagagtagcatggtcagccagacaatatgataggaggggcgtgggtggacctcacgcggccgttaacacaaaagcccatgcctggtaacccatgagatgctagatcgcatctctcgcaagtcggtagaatgatcagccagtaccgtgaagctctctcccgactattttgatcgactatgtacggtttcggcactgatactggcagtgacaatgaacctggtcaatgtccaggatctgccacatccgacattttcacgcccaatgccaattctgactttttatcattcgcgccagctgccgacacctatcttgtgccctgttcatacgatgacccccctttcaccctacctggatctctcgttgacatgaataatacctgggtaggttatgacatgtctgggatcgggtaccagccctcgtggatgacggacatcccgccgggcgccgaggcggaccaatcgtatctgagtggagaaggattgcagagggtttttgcaccggagttcgcaattgatgacccatgagttcatccttgcatgtcacaatcaatcatgagtatagaccccacattgtcgaccttcaattggaatggccgtggcgagagttttgtccacgagaaccagcttcaaccatacccggatcaaccatactcggatcggatgacagccgggcagctcggcatgtttgagagcactccggagcgtgaggaaaccctattctcgtgtcgccattccgatcaagacgtttcaaagcttcttgaagcggatcatctgacgttattatctcggctcatggagcgttggggtttgaaccatgactcggaagttcagacacaaatattcgctttatcctgccaggatcgtaaaggtgaaaacatcaagggaattgtcaagtacctgccctagcgaagggtattagcctcattcgtcaggcatgggtgcaacgcgatcatccaattacatccagagccgtgtcaattcatgagtcaactaatggacgaatacggactgacccgagatccgcgccaagaacataaagcgatagaactgtgctaccagttcctcgatgaaacgccggaaaacgactggtacgctccctctccattagtagaacgcaaccgggattcagaggtaaactatacggaaacagagcaaagtctggatcttactgcctcaagtggttgccccggcccgtcgagtagtttgacaagcgaccgggtagatgaaggcgagcgaatcttttcggatgacccgtcgctgcactttactcacttaaatcgttcccaatatgctttgctctatcaggcacctcactcattgtgctcggggacgagcgcccttcgtatgcgaaactcgaatgtggagggagcctcttcacctgtcgttgtaaaatccaagtggctgaaagcggcattgaaccgtcgaacgggactttcgtcacccgcgaccatctgacgctcttccaggagctcttaatcaagatgaacattaatgaatcaccttggggggtgctcaagccaagccttcgtcttccaaccggtggcaagctaggtgaaatcatcagcaatgcgaaagttaacaagacaatccgccagagagaggggaaaaaccgcccgctgttgagcagaacaggtcaatctctggttgcgctcttccttcgcgcaatgtgcgagttcttcatgaagcgtcacgcgaacaatcattgtgagtttgtcaagagccagatggtgaaatatgaatgtagacggttcgactccaccaaagacggcgacatccaacaggcgtatgaactcatcaggatattgcctcagtcggcttggaagctcggtcgccctgaaggcttaggagagggagcttttggcaagacacgcccgattccgaggagaaagacccgggctgttcgacgcaactgagatgcagccggataatcttttggcaatgtgggatattcgacagtcagaattcatcttaccctgctgccgagaaatgcttttgttgagctaccggacgacctggaccgtggcgttgactcatgaacatcagtatccgcttgattgggatcttagtgttcaacgaaagtttcaaacgacgatgtaatacaactcacttcttgctccatgcgatcactatgtacaaccaatatcccaatctatcattattctctgtcaccgtttcccgccgtcggtcccattcagatacgaaatcaacaatcaagattcaggagagaccagcccgatactacgagttcttgctccccgaactcagtgaccggaagaattcgttgtacgcatgttcgatatcgaagagcatctagatcgaatgaaccgcgatcctcatcagccgtatcccgaccagtggcccgtcctcgacgcagcctctagatctactcacctgccgactctgttcttccgtaatctcctcgctcgccttcatcccattcaactcgatcaaccaacctagaatcttgcccctaccttcccattcccctgatcccttgaaacgggagtacccggccatgaggtccgagaggaacgggtggagttgatctttcgctcggaggttgagtttgagggcgtccatgaaggtgatgaatgactgtcaaggcggggcggcggacgtataggtgtccggtacgagtagaaaagagcagcgacgacgacgagtttgtttagcgatacagtttagtgagaggtaaaatcctagccggcgttcgctacactcacctgagtcgtctctgctacccatttcccgatctcttctccctcgccattcccggcctctgcgctatgttccaccgtggcaggtaccccgaggaccaaccgatggagcgccgccgggcaatccatgcggtacctcgtcatgaaaccttcgaggccgacgagtttctgtccattgggttggtggtacggacgatctagctggttttggagcaatttgaggagagatttgtactgcgccaagagcttgatacaggctggtgcatagctgtcgagcgagagacggtgtcataagaccaacagagcatcaacatggatcaatgagcatccatggaacccatactagctcctgactatactgactctttgctactgacgctatcccgcacgtatgccctctcgaggtactccaagctgacgatcaagccgtacaatgtcgaaaagttctcgatgctctccctctccgagttggtggcccagagccgtacttcttcgtcgaggttgatggccatagttgcaggtactacccgctgtatatattgatgtacgtatgacagtctataggctctttgtgagctggtttatggggaggtagattgtcaaccctccatctcgtcatctctcttgtctgttgcgtatatccggccgcggtttccgcgtaaactcgagatctcgcaaagttgggaatttagcaaatcttgacatctggtacttcatcttgagactcttcaaggtcaatactcgggtcagcagctcacagtacaatccatagacggtaatatagaccgtccatcatagtactctggaagtacagccgaaaactcgggacatacacggtcattcttcgatacttaaagtctcagatagacgacctcggattcgacctacaagccacaaaagcgtcaagagataacgcaatcactcgaccgaatagccaactcggcgctgtccgtctagtcacaacacaagagcgcattttgcatttacttcggtaggatcgtcgaacccagcgctgcatcataggaccttcagcgatagcgggttacaagcatgtctcaagatgagtcacaggacatcaccggtgagcatcccacacgtctagcgttcatcgccgagctctcggatacatatatatctgatagagcacaggaagctcgcataccgttgtcaaaatgacggctgactcttgtgaatggacctggacagtgaacgaacctgcggacctcgacccacggatagacttcttagcagggacggtcgccggtaagcacacttcccgttgactcaagactctgattcaaatgtcgtcctgacgccccattcaccttgctacaatgacccaactttctacttcaatctgatatgatatggaccttctacctggggtgcggaatcaaaggggccgccggtctcctagccggtcaaccattagacacaggtaagtcccctctccctgtcggcatacctgtcgaccccatccacacctcccgtctgatccactaaaattatctcgacttgcttgatgagcagtcaaagtacggtttcaatctccccagtataaaggccgttatccatcaacatggagtgcgatccgtgagtaccctctcaaacccttcgcttgcaagacgatgaaaggctgatccggcgatagatgggatggatcgtaggagctatcgtcaaggaagagtcggtcagtccgatcacgatgaggatttcagtgcctgggtaacgatggtgtagctgactatggcgtgtatcgaacggcgatatagccaagagggttgttcaaaggggtaacgtcaccgatggtgagcacgatcgaaagcccgaaacatatacctgtagacggagctaacgcttaccacatcgctccaggctggaattgcattcgtcagtcccgggtccccgcccattatcggtgcacaacgagcagtctcctgatatagccgctacgtcacagatcaacggggtcatcttcacctcgtacggtttcttcatgcgtctccctattcccggtctcggtccccccgcgacctcgaacgggacgtcgaatgggtccgagggcgaacccagcttgcttcggatcgggctcgcgggtgcgggtagcggattcgtcgcttcgtcagtcccacatccccgtcgaccgctgcttatcggagccacggaaagactgatcttgagtccccaacgcgatccccatgcaggttcttatcggccccgaccgaactgatcaagatccgacaacaatcggccccgacaaacgtctcccctacgacgctgggcgtcctgcggtccatcgtgcggacagaggggatccgcgggctttatcgtggatggggagccacagcggggagggaattggcatacgggccatactttattacggtcagtcacatcctcccaggtctacgtcgttcaagctggggctctgactttcgattccgcattgatgatgatggtattggtgggtgacagtacgagggcctgtgccggtactttcgttcaagacgcagaagcgacgtgaattcaggagcttcgacgccttacgcctcacactttcacgacgcccctgcccacggtcatccgcactcgcacgcttcgtccgactcgctcaaagcgtacacgacggacgtggccacggcgcatacgcataaacatggtccgaggtcgaacgggcatgataatctgatccgggaggccgaggccgagatggatgaactaggatggggcgagctgatgctggctggagggttggcagggatggtctcttggtcggtgagtccagcttgggggggtgctttgctcgtcttctgctcttccaacagggtacaccgcttaccgatgtgcccttctcacgcaggccaccttcccgctggacgtgctcaaaacccggatccagtctgtacaacctgacgtttccggcaaagttcctgatcggatatcagtcctgacggcggcgagacgagccgtgagagccgatggagtacgggtcttttgggccgggctggccccgacgctcatcaggtcagtcgacggtcgttctgtttccacgggcatcgatagcggggaggaatctgcacactgctgacatgtcatactggtttggtggggtgatgacagagcattcccggcaaactgtgtggtattcttgacctttgaagcgatcgtcgctgcatgtcgttgagcggcatccaggcggagcggggctacctggccattttcccttttcgaacagcatagcatagcatggtacggttaccgtatagtacagcatagacctcttattgaatgtagcatgagcatctagcatccagcagtatattatgtgcttattatcatcgttgccctctttgattttcgtcatttctccgcttttggctgtcgcgtcttccggtgacgaagcacgaaacaaccaggaacagacacaagggtggtcgatgatatcaagatggtgttgttgatgatcaaccctgatgtcctcacttggaaacccaccagcatatcaatccgatacagaatcgtaccaccatgtcaaagaaatccgcaaagtcgaaaaaggaagaggctctggcctttttggacgacctcgacaagctaggcgaagaggatcctagctcgacagagacccccgtcgtggccgaacggtcgagcacgcccaagccttccggggatgctcctcgaaagagtgtcgattcttccaggtcgaccgtagtccctggtacgtcgagctcggcatcggctaccaaggcaaagggaaccaagaaggccttgaccgggaacgttcctgctccgacttcgaccccggccacgacttccaatgcgaccaccacctcgagttctgccgagaaaccagagggcaccaacgaggaagaccctgaagccgctctggcctatcttcaagctcagatcgaccagaaacgacccatctcccgtgtccagacgccgaccacctcgacacccgtcgcacgtcctgccaccccgcagtcagcaacgatcggttccgtccttcccgccccgacgaccacgaggaaatcgatcgaacagactcgatctcgagcgggtactccttccaatgccaacgaacctaccaccaccggctctcctgaccctggagcgagttcgtccggcgggtggggattcaaaccctccttctggtcctcggcactccagacggccaaatccaccgcttcctctgcctatacgcaagcttcacaagtagcctctgccgctcaatccgcagcgatcgcccaggcagaaaagacgggcgtcaaggtcaacgtcgccgatctgggtgtggacttgcgtgggttgaatctggaagagttgagaaaagctgggagtggggggttggaagccctcaaagcgagggtcggggaacaggtcaagggggtcgatctcgagcgattacgtgcgtccaatttgcatcccgctgtcctctcttgttactcgcacactgcttcttagtatcacgaaaaggctgataacccgcccacctacgctttgatactctcaggccaggacatcctcgccgggaccagtcacgccctgaatgaactcatcaataccgtcgctccgcccatctcggagcacgaggtcgtccaggtctggatgacacaccgtatgaagggttacgatggggtcgagagcgtcgtataccagggcgtcatgaaggtgcgcccaagctgatgccatactcttcccgccttggtcgtgagctaataggacgacacgactcgcgattctgtagatgatggaacagacgtcgtcttccgagctcgaagtcttcttcctacccgcccttgaagggaaatccgacgtccagtctgcggaccgctcgatcaaccctttgaacgggtgggagtcgggttgggcggctgtggaaaaggacctcgaatcgctcaagcaacgtgcccgagcggacgagcgcaagggtgaaccgaaccgtgagtcgctcggccgaggggaagaaagagacgttattcacatggtcatatatgcttgtgggttctctatgttaccatcgtctttgacaacgacgtttcgtggcgcctcgttcgttacaactgtgattcgtgtctcgttcgtttgttcgttcgctatatgctttgcgtaactgcgacggctgtagcggacctgcccgtgacgacggtgcccgtctacctgcaccttcaacccgtgctcgtacccttgccctttgccgagcccccttcgtcaaaggattccgacgcctcggtccagccgaaacatttgacgttcatcatcaccctccatgacgacgtgcacggactcaagcagagcacgattacgcagtactcgccggcggattggatggacgtcgaatacgagaggagcgactgggtcgaggagaggttggtcgacgtcatccgcgtcggagtagaaatcgtcattcaggaggtgcgtagagtgtcgttgaaagcggtaaataccgcgcggcgtgctgatgccgtcttctcatggaaacagtatgttgccgttcgtatgggtctaaaggccgcaccgacgaccgaggcgtcccaggaacccaagtcccggtcatcgaccgaggacaaggagactagtgaggaaacggtggccaaggaagccggcgttgggacatgatatggacgttcatcgtgtcgttcttgacgttatcggaaattgtcgaagaaccggagtgctggagggatacatgtagcttgtcgtttgatctcgatgtctccatatgaaatcgtcgtaatttgtggttggctggggtcatgattgcgagcgagcgatgcgctccacgcataggcaaatgcttgatcgcagtcgacctagaatctgagaagtttgccatcgggcgcgcagggcacgacgacggtcttgtcttgaatcgtcaggtcaaccgggaccctgatccagccttctcgaccggccggatgagggtagtatcgacgctccgagctttcgatggagaacaaggccggcgaggatgaaggtgtcaacgagtccgggtacatgttgcatgccggcaacgactcgtcacccatcctgccattggcagcgtacccaagcgccatttgaaacgtaactttggaatctgattgacggtgttgattggcgaggcgggtcatcagggcacgtgaggtcatgcgttgagcaggagggcagacaggcagattgtgacgatggcgggagatgtcgatgaagcaagagaggactggatcggggaatcgaagcggtcggcgctcgatcgtcggccagacccctttggcatcagggcggggtccacgaatggtttccatgaaatccgctccatcgtcagtggtgttaggagcgggcgcgtccagccttccggcctgcgtctcggccccctcgtccttggtacttcgcaagacccgtctgacttcatgctggagtcgctcgtccgagtcggttgtgatatgcaactcattcaactgatcaatctcttctcgctctggtgcgggcttcaggctaggcggatcgacgatcatggccgtcgatccccctgcggttccatcgaggtcctttgtctgtccaggctcgtgtttgatagacatcagagggatctccgcgagcgacgacgtggtcgtgtgtgcatcggcagcgatcgacgagcctgcctctgcgtgggctacactaggtgttgtctcctgcgctccctcgttcgtctcagatgggcagagatgcactgaacgagtgttcgtctgcgccaactcgtgctcaacatccagctcgtccctcatttcgtctttctctctgcaactctcagccttatccccggtggactctggttcgcgtttggcaaatccgcgagattcctctttcggcaccgtcgggctagacgcgatgtcgagcttggcagcccttcgagctgctcgtctcgccggttgatccttttcccatcggtcgagtcgtgcggcttctttcggcgagatcgtgcgcatgccatcgatccatgtgaacgtaagatgggtcgcatcgctctcctcactgacggcccgcctgttcagctcgatatcctgactttcgtccgggtcgttctgatctcgcctgtcgtgtccctcgtgcgttgccggtagagcgactcgagacgattcgccggtaagctcacttgggttgaaagcaagttgagcgagctccgtggggaaaggaatgttgctggggacgacgctgctcgagccggcaatatgcacctcgctcgtgccgttggtcgccaagtcactccatccgacctgctcgtcctgctcgatcctcagcgtcgagctacattctgatcgctcttgctgcggctcaacgctctgccctccatcctctacctttgctctgaacctgtcccgttgactctgctcaaagacgtcttgatcaatctcgatgaagccggccgaagaggccgtccaggggatatcgagctcggtcctcggcatcttgctcgaatgatctggtacgacgtcctcgtcatcagaatcatcgacgacgatgacactgtaccatgatgatccccgttgactgtcgacatgaagctgaggctgggtttgttgactttgtgtgctggtggacaaccctggttgtctctcggaccagagccgatgtcgacgtcggagggaggttggcgaagacaaggtcatcatcatgcgcacttgaagatgacctgatgcatgtgttgaagtggggagggtgagtcgagaggagacttcattccgttgagaccgcgagtgacttttcgcttgatctatctgattgaccaacttgcccccgtctggtatcggccaacccgttcgcttgctcgagagtcagcaacaggctcgcagtctcaggtctggcgctcaccggacttccccgagcggtaatcttgtcacccggttcgatacggattggagctttgtttggtggatttgctacagggagtctgcgctccctgtcgttcaacaaactgttgtttacaaagtgggatgaaccgattcttgtcttgtcccgcaaaccaacacagtgcgggtgtgcattcgcactctgataccagatttggtgatctcgggatgacctctacctcccctggcttcatcagcttaccccacctgtttgataacattcaggcatgtcaaacgcaacatgtggtcggaacaccaccgtattgtcaaatcacgccatctgtcctgatatgtaccgttgctcaaggcgatggattgaccgtacacattcatggaacaccgattccctgatcgtcgacaagttcctctacgtcgtacagaccgcctaaagttctttcactccattttgttacaaccgccatcacgtcgtcacgcctttgccttgacggtagcctcttccctcacctggcagagtcggtcgtccgctgataccgaccccagcagtcgcccatgtcgatcatcccacgcccattctcccgcatatatgtctgacattaccggattcacgacgacgacacagtgaacatggcatacctgacaaacgggacggcctctgtgaaacccgaaacatcccgctcgatcgcgttcaactcgtctgatcacgtgatacagtttataatcgcccactactcagttgaaggctttcgatgtgacccgggaaagcagtactctcatttggtttccttcgcagacgcttcgaatagggttccccaggtcatctaggcatctaatacttattctccacctatcaggggttcgctcgctctactgctgaccaggtacgccaggtatgaggggaggataactcatccattgcgggatagacgggactcgggctgtgcggacagacaagacgtcatcatcctgttccattcagtcgacgggtcaagcgaggaggcgcgcttcgtcggggatcagggaatcggatgccgtcaagatttcatatcagtcgcatcatcctggtatccaacactagcgtcgaacgaattatcgtgcattgtgagtgtcgactatgatcggtcgaaaagacgaacggatgcgggccttctcgccaagtcccgcagagagccgaaagccaggacgcgcagatcgatcaggcttcgacgcacgagccttttgtgattgaagatgttcagaaaagccgtatcactcggtcgggtgtggacatcgcaacaaaacttgagagctggggaagcgaggccgactgacagtcggaccttcgcctatatacccaacctctgaccctcgtcaacgctacaaagtcccgacccgacgagagggcgtcagggttagtgcgcgcgcgcgctggaggagcaggggaaactatgatggttggtcaaacccgaagacgggtgtcgacgacgtgatctgcccaaacgccaggtacaacgggcgagagactgtggtcgatgatcaagatctttatggccccaagctttcggttcaatgttcgacctggtgcaagtctcgctgcatcctgaatgatatcgctgaacggccttttgcgagattcgggtcaaaccttgtggatcggctcgttagcgcgaagaaacggaaatagaaatcaaatcgacaggcacgggaagaatggcggcaactgatttttttctctccattatcagataacccccaacctcctccgtctccctgctacctcgcattcgacgtcgcccgggacctaaacttcgtaaccctgtagacccaggagggggagcgagggatcaaggttcgtcgcattcctcccgagcagtccgagccaggcgtcggacagagagcttttttcgccaaaagatcggggagcggaggagcaggacgagcagccgggatatatataacaaccgtggccctcgctggacgtgcagatcgaatcttgctcccgctcgtcatttcctaatcagattaccatttgacgatcacctactaggtcgagagaaagaaatcatcgctcgtcggatttgaaacgaatcgcaggatgtacacttcgtccctgcttggactcgccgccgtgctggcaggctcggctcgggcagctctagtggaacactactggaacatctcttacacccaggccaaccctgatggtcttttcgaaaggaccgtcatcggtgttaacggatcatggccgtgagtccgggtggcatggatatcgcaccgtcccctagagatcgaactgactcatcttgctatgcgttctcagcccaccacccatcctcgtcaaccagcgtgataccttgcgggtacacgcctacaacggtctaggggacgtcggcacctcgcttcattcccacgggaatttcttcaacgggaccaactattacgatggagcggtcggcacgactcagtgtgcgatccctcctggtgaaagcttgacgtacgagatccccatagatctccaaactggaactttttggatccacgtgagtggtcttcttcgactcgacacgctcgatgagctggggaaaagggtgatattcgcccgtgttgctgaccctaccgccaactttcgttatcatccccgtttagggtcattacaacggtcaatacgtcgatggtcttcgagcccccgtggtcatcctccccgccgaacctcgatcggacaacctgacatgggacgaagactacaccgtgatcgtctcggactggtaccacgatacccacccgacgatggtcaaggagcgtttcctcgtctggtggaaccctaccggtgccgaacccgtacccgagtcggccatgatctacgtcgccaaggatgggaaatacttgagcagctacgaggacttgatggcgggtaagggaaccaacaacgacgccgtcattcccttcgaggccggcaaaaagtacaggatcagggtcatcaacatgtccagtctgtcgagtgggtgccgaattgcctagcctgatccttctcatcaacacccgactgacctgaatgtcccaccctttcctttctagtgttccatttgcaaatcaaggatcacaccatgcaggtcatcgagatggacggtatcgacacggtgcctaccgagacggacatgctcaccatcgccgtcgcccagcgatactcggtctacgtcgaagccaaagcgaacaacgatgccaactacgccatgatggtctggcaggatcccgacatgtacgacgtcatccccgacgcgctcgtcttgaacaacacggtccagatccaatactcggccactttggcccccgccgagcccttcacgtttgatgtcgccccgaccgagtactcgacttaccctatcgccgacgatacgatgttcaagcctttgctcgtcaacgccagtgtggcccccgatcaggagttcaccattgtcgccacctttgacgtgagtgggtgcgcgtttcaaggaaccgatcgcatgccactgacgaccgtgggttctttgcccatagacctttgatgatggtactcctcgatctgcctgtgagtttcgcctcacctctccatcgtctcgatcggtctactgatacgtatttttccatgttgacccttgttcagtcaatgacgtgtgagcatatcacacttgccttgcgtcgataacgctccttgaccaggactgacgacctgttcgacgcgcttcacagcacctaccagatgcccatgactcccacattgttcaccgagatgaccatgggcaacgactcgaacaacgccagggtttacggatcgatgaccaacgctttgatgctcgaccaccttgctatggttcaggtcaccatcgttaacacgtaagcgggccagtgctgctgcaagcatttcgctagaccaatgactgattcctctcgacctttcagtgacgccggtttccatcccttccacttgcacggtcacgagttccaggtcatgggcaaatcgactgattacctctctgacgaccccgagctcaacccgcctatcgtcgagcaggagaaccctatgcgacgagacaccgtcaccgtaccccccggcggatcgactacgatccgattccgagccgataaccccggtgcctggttgttgcactgtcacgtaggtccaaaatggtcccccaatctgccgtttacgctttattgaccgtatcaattccacgtaaaccaggttgaatggcacatgaaccaaggtctcgccgtcactttcgtctcgttccccaacgagacccaaaagctcttgaccattcctcaaaagatgatcgatcactgcgaggcgctcaatattcccgccagcggaaacattgccggtctgatgtcgaccaccgatttcaagggcgagccttacggtccttggcctcagaagttgggttggaggcccaagggtgagttcgtgtggcctcgttcgctctggtcgtgtagctgactctgcttgcgacactgcaggaatcgttgccatgaccggttgtgtgttgaccgtcgtcctcggtttcgccaccgtcgtctggtacgcgtccggcagtctcgacgacgccgagatcgaagaggagatcaagcgcaagcaagagttgaagcagaacagcggtggcaagctcggtttcatcaaaaagcttgccaaccgaagctagagcgcacagacgaatatacgagcaggatagtgaatctctgatacataatggaaataacgacaatatgccatgacatgatatggatacagtaggattgtctcattcgaaaatgacgtcgacgtatctaccctttctgacgtgcctcataaagtcgaggaccacgagccgcctgatttctgacaagtccgagatatccttcgaaatgccagccttggccttgtttgcttctgggaatgtgcatcgcgggatcatgtcccggaagcccaacaatttcaaagctggcagtcgaggtcgatcgtcagagctggaaggtattgaaaacagacccgccaagacggtcattccaggcataaactcggttacgaattcgttcggaaatgtcctggtatatgacatgtccaggaactagcaaacgagcagtcgcgtcagtcaagaacacactggctgaagcggtgtccagactcacttcgagggatgtgaaagaagtagagatccgcaaaacagctttattccgcccatcttgatctctcgccccgacgccggccaagctcaggtctttcaatctcagtcccaagagcgcgttcgtcttggccatgttgcctccacccttgcctcggcacaagacgtcaacaatgtcttccatagctaagccgcacccggcaaacgagatcgaagtcaagttggccaggttgagtggatctgtgaacatttccctgaaccgtcgcctggccgatgaaggcaatggcacaaacgataaatcgagcatcggtaatgcttcgatcgcggcgggctcgcaagtcgctccatcattctctgaatcggaatcgtcccaatctcccgcactctcgtcctcatcggccgacagagccgattttctatgccccgccgagcccggttcgaaaagctcgaacatgcctctccatccggcgctccccgtgtacgctgcgtgtaccatgagaggtaatctcaacctctcccgaagtgtcatcttgccctcatcggttgtcaaccaggacgattccttcttattttcagaagttccgtccgggagcaatggatcgaggtgttgggcaaggacggtgaggcactgagatacgagggattgaactccctctctacagactgcctgcagttgacctcgactctgaactggtccccctatccagagctcgagaccagtaggcaggatcgcatcgtcgagatgtaaccgctttttcagtacttgctctgcccacagagaatacatctgtcgccttttatccgccgaccacttgcgcccatttccgtaatcggaggctgcgggctgagagctagagggtaatgtcgttcgagcgagagtggcgggggcgaggtctttccaagagtcaggagctcggggtcccggtgttcgaagtctgccgcttagtgggctactcgctcctatcgtcgcggtcgatggcagcacatcaatccctgttgctctatattgcagatagtgttataggtcactggtagtctatcgaatgctagctgagcaacgacttacaatccgcctccatccacgaccaggttcacggtctcgtaatcctcttcgtcctgccgcttttttacgttcgccttgatctgcctctgcaagacattgcgtcgatgacggccctgctctagcctacatgtagcatgtattcacaaacaggatttcagagatgagcccgagcggacgacgatgcaagccagatcgactcgcctcaatttgcccaaaagatcgttcaccccggtcgagctcgaggcgtctgcatcccgtcgaagtggttgcgtatgcgaggccgaggcgacaggtctactaccgctaccgaacctgaaccgaggagtgtccatgagaagtactttgggtgatccgtcagcatcgttgcaggtggaagttcattgaatgaaattcctctttcaataattgtggttcagtactgtaagtgttccgacggtctcagccgaagatccggtgctgctgagtcgacggatgacgtgtttgtcgcaaaatcgacctcgacctcgacttgtcaacagacatgtattcgattcagttgaatacccatcaaatcgttcaagcatcaagcacaaccatagcagtcgtcttttttggtagtttacattatgcagacccctcgagtatcccacatcttcgctagcaaaacatattcacgtcgctcatactctagagggctagaggttggtgtataggccagcatcctttcgggccttggtcatggctgcgcagaagaaaggttccatcagtatatgctcagctcgatagggtcgagcgcgacgtgtcgactcggcttaccagcgatgatggcgcttccgacacccgatccgtcctcggcgtggtgggtgacaatgttcctatagagcgagacgacaggttcaacgatctatcgctaggaacgatcgtcgacgcggatcggcggaatatgactcactttcccttttcgccaaagatgtcgaccaaagcctcgtgaattcggtcggcgaatccggggtatttctgtccgaccgggatggcgagtcagcactcgcatgacccgctcacacaggtacaggacgctccggctcacattgtagagcgaaccgtcggcaccgacggcgcatccctcctcgaggtatcccttcttgctgacaatcgcggcgataccacaggcactcaatcgagcggcacgtcgaccgatcaacttggccaggtctcggaaaaaagtccgctcttccaaagtggtctcgagaccgaaaaagtaggaaaagactccgatcacggtcaatagctcgtcggtagggtcgctggtagtaaaaatggcgcaaagtcagtactgacagagtcgacaactcgagccaccgaacccacctctccatgagagacaagaacgcagtgtcgacggcataagccttttcgagcttgtaagtgttttgaccgaggaacaagtcaccctggtcgatcaactcggtcaggacgagtcggaatacttctccgaggtagagaccggcgatcatcttttcaaaggactgctcgccaggcttgttggaggactcgtcgatgatgatgtcgaacttggttcgggctggtgttagggataaggtcgcttcagtccataaccggcagaccctgacagaggcatcaagcaaactcacgcaagtgctggtggtcaaacgagtcgaacgcaccccattcacactgcgatcgacatgcattttcagccgctgtaacgcgacgtcggaaatgatggacctacgttgatggccatgtcctgatcgggagccaaacccaagttgttcatcttgggaatgttaccggcctgctccatataagcggcgttgcatccggtaccaaagatgcaagcaatcttggtgttggggtcgacatagttggaagcgatcaaggtaccggtcgtgtcgttgatcaacgcggtcatcttgcatcgaacgttctgtcaagaggatgtgatttgacggtcaaccggcaagtttcggtgcaggcaggctgtgacggggaacgtacgaatttcttgagcgacttttcaaacatggcaccgacatcgtgtccctcgacgttaggagcaccgaatcccttggtccacctgatgagttctgtcgtggggcggatcgtatgatatgtcatcagtcagccggatcgctcgtttaatgcccgacctagttcgaacattgcgcactcacctccgtgctcgattcgctcttgcctgcgagatgggcgtttggaggttcagcacggttcgtataaagggcctcacgtcgggactcacgagcaggggtaagaaaactatatcgcccacgcataccactctcatcagcctcgtgaatcgacccgcacgactcgagacccggctcgctcacagtgaaacccaagggcaactcttcatccttctcagtcctacccaagttgtcggtgatgaacgatcccaaacactcggcacagaaatcgaacctgtgtatgtgcacccggttcagttgcgattccaacacctgacatcgagcgctggaggatgtcgagacccggtccatactcacagtttctgtccatcttcctgcttttgctcttcggtcaacctgtatttggtctgggtgacctcgaacctaccctctccgtggagggtgacgaggcagaccctcaagttggtaccaccgagatcgacagcgaggaactctcccgtctctttgccctcggggtatccaaagacaaaggtcgggactgcgtcgtgagatggccgtgcggggtgggcggtgggggagaccgagtgacttcagtcggcacatcgacttggtcgaaccgaaaccggggaagactgactcatagggacgatctctccctccttctgcaaccccttgtccagcgtctcctcaaaggcgtgcacgatcatcctcatcctctgcggggagactgataggtgataccgggatcaggaacgattgaggcacgagggccgagtcagctcggcaatttcaacagggtaagggagatttcttgcgaatctgcacgagggcgagcgagagtgggggacgacggtgacttacgggtaaagagcgcttcgtactttcgcaaatgatccgcgatggtctctaccgtagccgaacgatgaggtatcagcacgccatcgtacccctttcgaccgcagcgaaatcaacactgactcttctcggcgtgggggtaagaaaggtcgtcctgcccgttccacaaccagttcaatccgcactctcatcagccacccaagtcccaccccaaatctatcacgcccttgatgacgccgtatggacacccgccctcaccgcgcccagactcacgttggtcctcgtatgataggccacgacctgtccacccggggtgacgacgctcccactccccctccttccactcggactggggatgaccgcgctcatcctcctccccgcaccggaccctccgatggagacgctccccttccttccgccctcggtggtgacgagcggagaaccggcgatggattcacgttgcatggtaggggcgtggtgcataggggtgaacactggtggggtttgggcagaggaagggtgaaggggagcgtgatggtgatgtcattttgatagaaacacgatagaaacacgatcaagtcgaccgtttcatgttcaaaaaggagttcggtagaaaaagggtgataacagacagaagaataagcgaagaggtttcacgctgtaacaggtttcgcaagccttgacgcaccaagacgatcatgtcgcctccggtcaacccgttcgccggacttccttgcccggacgtttcatcaatcgcccgtccctttcccttcttgtcccgcttctttttggtcgcaatgaccagacctccagttcggtccccatgatcgatcccgtccccgccatcatgtcgactcgcttgtgaataggcgtgccaccggaggaccggcaaaatgagagcgaggccggtaaataggtaaccgtacgattcgttcacggcttcgctgcaacctcgccgcgaggcatggtgatcatgatgatgaggatcgagggttttcttcgccagggagagatagtcggaagaagtcgatggacgggccaccatcgtctgttctggagctttcctttaggaccttttttttgtagaatttccggcttatctctcgagtctcccggtccggtatttcgccacaaacgttcgtactggcagctggcggatttcgtgcgatcagagagatgtagtaggacgctcgaccaggatttcgatagtgacaagaatgtaagattacaagcgttggtaaaggtggaccgtctgtctgtatgtacatccggatatctcaggttacgatgggatcatgagacttttgtctggcgacaaccatgcactttgggatggtcgccctcgtccggggtgatcgcgggagaatacaccgagcaccctcgagagcgaccgactacggacggacggttaccattcggccctgactgccaatggtgctgctgctggtgctctgtgcgggagagacccgatcaagatcagcggattaatttacgccaagaggaacgctcgtcgatgatgccatttgtgaatgcgcaccttctccccccccccccaaagcccttgacctctccgccgtgtctgtctcgcttgcaatcgtttctctcgagatccgcgcgcgcgcctttgaccgccaccgaccggcaagtctcacacggagacggaatcttttcgtagctctgcacggggaccatcaactatctcgaaagatataccctgccactgactatcagaggctgctcgctgatccagaagcaccgaccgccctgttgatcagataggaaccgatcccaaatctcgacattgacacaaccagcccgttctcgaatcggaggcaaactcaggacatgttctagaatggggccgccactggaccggacgtaactggcagccgtcgggattggactgagacggtattgcagcagactgttgatgtcgccctttcgaccgtcgcgtacggtaaattgcatgtcctgcgatacaatttatagccatcattcgcaccacttgagaatgggagggtacattggccatcggtctctgactacgcatgctagccggcctattcttgtccaagttcggggaggaccccatccgtccgaccgaatcctcatccacatctctcggctaaacggagcttggtcgcacgttcgaattagagtttcatgcggcttgtttcggcactagaaagtgtcgaaagatccaggcggtgactttccgtcctggcgatgaaccaagtcaatcgccgttctggggtgcaacgaagcaccgggttatcccaccctcggagtgaccagagagtctgcccgccgtcgtatccactgggaatgtctgacaatgccaacgtgcaggccgcggggttgaccctcaggtagaagaggcgacgacaggtgatcattccctgcgcactttctcccggctcaacaccgctggatcggccttccatccgttcggtccagtgcggattgctccgcatgggggtttcctgcaatatggcatccgtttcagatggtcgattcgagaaagagtccttcgcggctcgacgcggtcctccagacgtatcagacgggacagagcagcgatgcggctgtggccgtctctagcgagaaggacggcacgtttcggcaagcagtcgaatcgtttgtagaaagtctcaaggggccgggttgagcaggaagatatgctgtcgatggcatccagaccttggatcaagtcggtaacgaagtggccatgtggatgggatcaccaacttctcagtccctaccgggtatgcagaggtcgcaaccatttcctgacctgaaatcctcggccgtcgaagatgtaccgagaggctgcccgagaattggtgatcttggacgccgccacattctaaagtgattgctgtccccgccccactccgctccgagatccacccgtctcatcggtcgctcccaaggagacatccaaagatgacgaccatgatgctccctgtcagcgccgagaggaagaacacgggtgtacgagtggccgagtattgatcccttgtcaagaggtgttgagtgagaaagtagcggtacatgcctatccatgcccccaaaaggaagagttcaaaaggacaaagactgtaatgagcgaccagatcaatccgcaaggtcttccgtctacgacttgccgatcaacatggtcaccaatcctgtcccgatgagtagccctccaagaggtttggcgaatcgtcgattccggttactcgtctcgaggtcgtacgtcagtgccgagtagtaagcgtcaagagtttcgagcaagcgacgctgagcatcgacgttgggcgaggtaggatcgacgttggcatccgaaggaagttgcaatgagggacgggtgggttttgagagtcggaataactgggcgacggctagtgggccgaacgcggcggatcaacggtcgagccgtgtgcgtagcagacatcacgagcatcgcactcgcactcaccgaccccggccatggccaacgagacgctcgttcgcatccatgcgagaaacgtcctctctgaagccaagtgatccctagctacgctccccgtgttcttcagtaccaagctcatctcccaccacctctgcttcggatcccccggtttgccatccgctggcgcttgcgtttgcacgtcatgcggatcagctcgatctccatccagtactgcattatccacaatctctgaaggaggtctacgagtggccgtcgaatacagactcggtgccctggaaggcagctgttcgaacgcgtcagcagagtcgtctttgggcgtcatttttatcgagacttgacagaccttgctctccttgtgccgggacagcatgtcgatcctggttgattcaatcaaatagagttgcactgcagatcgttgtctcgagagacagggtctagccgtggtgattggggcgatatcaaatcggcaaatcaaccaaggtttgatggcgacatatggtcatgaattatatttgcaccgagccatgtcgagcggatggcgtcatcaccacaactctcacaaaatcgacaaactcgcgagatcacgctttcgcagtcggaacctcgcaggcaacctgccggacaaatgtaaacatgaacacaaagagacatagaaacacgcaggtggttctttacgacacgagatccatcgtacgtgcaagagcgtcggcagcgaacatcaccgctgcccgatcacgaccaactctttccgcagcgcaacctttccggcgcggtctgggttgagttgccagttgtagagccgtgagattggcgggagagtggagatcactcgacctaaacaaaaacactgctctgccgcaagccgagcggtcacattgtaaagaagcagggttgttttgttcatgccccattacctctgcgccagacgatattcgcaccggacgtgtcaaagtcgcactcgagtaacaaaacaatcacgcaagcaactttcgatcctgccaaacagaccaaacgcacatattcaaaccagagaagtatatttcatatgctttctccaggcgagagaattcggggggatgggtggatgggatgcatcgagtgctaataagttggagtccaggggggggaataggtgatctccagttcagaccgagttggacatcgtttactcgtcgtcctcgtcgttctcctcctcgtcctcctcctcatcctcctcctcgtcagactcctcctcgacttggctctccaaggtcgaagtggcgattcggtccaagtcacgcctgttttcgcaaaagacacgcatcgcatgatcagcccatctgatccttgtgctaggcccattttcgaggccgatcgggctgctcagactcactgtccgtcgacgctgatcttcctgccaccgtcagcggccttctcgagcacaccgatcttctccaaagactggaggacggccctctggacaccggtagcggcgtccttgtggtgagagggcctgtttccacgacggtgggcacctccgtagagcttggcgagggcaccgacaccgacgtgcttcctgaggtagatgtgtcgggcgatcgaggctgcgcgagggggacgacgggtcatcaagcgtcagccacgcccgaccatggaatcggcaaaggcgggtatgggactcaccggctcggacgtagtaccagtcggggttgtaaggagccaactccttgaacgaaccggtcttaacggtgtcgacccagttggggacttccaactttccggatcgcttcaagtgcgaagagtaggcagcgatgaacgcatcagcactgtcgcagggcgatgaggggggagacgggtcagctttcggcgcgtggacgcgggtggaacgacttagagggtgtcagggtgggacgaggtgtagaggttgtcagggaaatcagaggtgcaggacgacagggaggacgtcgtcgagagggaaagatggatcgtgacaggaacggggtcgggatgtcgacgttgcggatcgctgagcggtctttttcacacgcaggaggacagcggttctcggagacgattgggtatggtaggcagggcaatggcattatttgctgagagtgtcttgatgtgattttgtcgctagtggttcgataatgaatagaatgccaaggtttgacgcaatgttgatcgatttgtcggtgctcctacggtcataacggatggatcatgtttggtcgtccggtggtgcggatcgaagttgtggctctgagtatgctgatgtgcgagtgtgccgcattgagccttcttcctattgccagatcgagtatgcctcggtcaagaggtccgcgtctcgtccagcatgccgacgcttcttcattgtcttgagtggtgttccagttatcgacagtctgtcggtccgatcccaagttgcccgtgccgttgttgccattgccaatgccaatgccgctgccccatacccaaaatcgtctcccgaatcgtctacatcttccctcggtggacctgctgcagcgttccgtttccaagtccatcccgaacgaaccgagaccgtatcctgtcatgcaatttcctttcccttcaaacgtccctcctgtatccgccttcggatcccctcgaccaccatcatctccacctcgttcccctccccctgataccctccgggtcgtatatgcttcggtatgtgtgaatacgcacgagagatccctaacgccaggcatgatgagactagcttttgatttttcttttcttggttgtcggcgggaaaggaaaagaaagggaggttggcggtgcttgctggactaacgaagacgacgacgagaagaagaagaaggaggaggggtccggggcgggccaacggggggtcaggacgatgtgggtacggtctcgatggtgacatggtcgatgatcctacggtccagactgggggatcctctcccagccacggttggtggtcctggctgagagctggtgagagctggtgaggggggggagggtgtctggttggctgagggctaagagacgcgcgcgttgcctgggactcactactcctttgcgcttttaattgtcaacaaacatgccagacagcaaacgcaaagcaaaacaagtcgcgtcccgtctcgcctcgtcagcccatgtcaatccgccaagggcgacgcgtttataaagaatcggagttatcgccgacctcaaaccccctcaccagctgccacgatgaaacgggcctatgaccgctcgacacaccttgaaactcgggatccctacatttcggcttgggtcgataatacgtctctagccttacgatgttgtggtcacgagttgctataggactgtgcaaaaggccgttacgtcatgctcaagtgggatgatattggtggaaagacccgcaagctccggtaccccaattcacgacgacgacgatcaaaccggagatccatcggtgtacgctcaatagtatatttgactgctcgagtggaacacaggtccgctctagcatgaacccaggctatgttctttccatctgtactacacgcgtcggaccgcagcatcccagagctggtcgaccttctcggaaatgtccttcgagtcaaccacgtctcatgtcatcgcgcttcatatcttccgtatcataccgtccctcatctgagtctcgtgatgtcagttggaagagaaccgaacgatttataccatcactagtatcaaacaattaccatggaagaagatcgatcgtatcgattcaaaaacgaacccatctccttgcgaaggcgtcccaaccgaaccccacgtacggcggatccgcttactgcgcgtctcgacccataatcatgctgcgggggcgtaccgcgaatgatcatctcaatccaaccgacgagctcaaccccaatgcgtgggagaatggaattgaggtcttttaaaacaagattagaccgatccaagcggacccgggtggcaggcgtggtacgcagacgtttgggcgtttcatgctcgtccacaggggactttgttgaaccctgccagagcaggacggacaggaagggtgtgaacatgggtctcggtatactacgagtacggtcctcctctcctagaccgcttgaagatgaatggctacaatccgctgggacggaaatctggaccggtgtgggtgaggtcaaggtggactgcgacatggacgggctcatggtgcgtgtacgagtaaagctgaatgccatcgagaccgctggtcgcatactgcgagcttatgagctggctgaacaatatcgcgacgaaatacagcggattgaactcttgagaccgtacgttgattgccaagagactcgaaagtatcacggggagagtctcatcttagccgacgccgctgacgaggagtgtctgagtaatacgcagcgttcgttcacccatgttgcggtagcactctcgaagctttctctctgatgcccgatggaggagcgcgatctgcagcgtgctcgaacacatgatcgatgaacgcgcctacccctgaagccgaacaatgatttaagatttcgtctcgccacagcggtcgatgctacaagctgtgtgataatcgaccccatgggctcacggcaggctttggtagtgtctgttcatctaccttccgctttcatggaaggacttcgcctatcctctcatcatccgtttcatcgaaatcctgctccatagtctttgtgacctgtgacgacgccggatattcagccctgttcgagctcgaggcgttcccccttgacttccaaacttgccttcttttactaccttgccgcctctttagcattgtatcgggcccattagattcagtccgaaagtgtcgggtacttctctcgtgactgattgaccgagtttgctgtcttaaaattcgcctcatctcctagtattccaggctggctccgtagtttgtgattgttttcggagacatgttttcgaaacaaagcacatcgatcaatcgtcgcaccgtgaggctgtaagcaccagcggaaactcccgccagtatgcttgacgacttccggcaccttggctgttcttgtcttgctgcgcggaccacttgctactcgtgtccacataccaacgcgaccgcctgtgtggatccgacatcgtctgacgtaggggcgtagacattgctcatattgtctctggccgtggcctgctggtctcgacctcatgtggcactccccacatgttcactactacgagcgctacagagtgaagatgagtccggaccagaacttgtggtgcgacggatcgtcacctgaccgcagctacatttcttgtaatggcccggggttcaactgcgaggtcttggtgcggactcatctgactactagggaggatgccaagcgagtagagaaagtcccttgtcgcctcgtcccgtttgggctggaagctttcaacaacgcatagctaaaggctttacaactgacgagcagttcggtgcagtaagcgacggctctgacaagtgtcagtttccagctagcgctggggctgtccttgaacacgcgcagcattcgaatcgtaagcttgatcatcgtacatgtcctatcattacaaattatccgaattgtggggcaaaacaagagataccgaaggatatgtggagcgaggccgctccgatcggggtctggatgcggattaggctgggaccgagatgaacgtggccgagtgaggtgaaacgtccgatcggatgggtggactagactcgtcgaggcgaacgtggagggcgctgggtttgggaacgggtggtatgatgtcacggacaagtggcgtttccgagcacaatctgggttaaagttcgagcaagaggtcgagtcgagggcgcgatctacgggggtatgctatgggtgatgtgtcgaggtccgccagaccgggggttcgtttatgagaggcagggtgtagagattcggagaccaggagcaaaggggcaagatcttcgacactttggatcgagacgagacgagacggccgagccgactagaattgatgatcccaatcctcgtccctctcggccctccccccaccgaccctggcagagtccctcttgttccccgtaccgctcgagctgttgacattcccgtacccattcccataggcttcatccgacgtgcccgtcccccgtctgttccgttcacgaccgcccgtagcggcagcggccccactgcccgcaccggcgcctgacccgtatgaccgaccccattcgggcacgtcgtcgtcaaactgagcgtcccaagggcgatcagcgttggacgtgtaagtatgcgggtcgggtttcttggtcttcttcttgttggatcccgtgatggctgccagtccgaacgacttggatggggtctgaagcgagaaggatgagaggatgcgtcagatggccagatgtgaagtgagctaaaggagcagacgcgagatctcgaggataccgtatcgtggacttacggcctcggccccttcaaagttggcaggataatgccaatgttgttgattgggcgccctatccggatgttcacgttctgccgtacgccgaaaagagagaggaagagagaatgggtttcccgcccgatcaacacccgaacaacttctccccgccttcgtctgacgatcctcgacctcgctctcgctctgctcaccttcattgtaatactcctcatcctcattcgtccacaacccctccctccgcctcctcgcgacctcttcctcatcgatcgtcctgctcgggacgtaattcccaccttcctcaccttcggcgagatcggcattgtccagcgtcgaattgggcaatcgttcgtcgtaccgcttggcccattgagatttggccgctcggcgcttgtcttcagagtcgtccaccaggccggcctttttcacccatttcggagtacgtttacggccgtcgctgcggggaaagagcaagaagggggcaagtaggaggagaggtgggaagatcagtccccggtcagggtcagacgatgaaagggagcccggtcgcgctcacttgttccggatgttctggatgtaaaagttgtgcccatgactaggaatatctacgagttggcgtccccgtcgtgttcacgagtgtgagcaagcatcgagacggtatggaatgaagagagaccggctctcgagaggactcacacccgcaaatgcacaggaaacagttgaggaaaaagtcaccgccgattccgaacctcatcgcgacggctgtgttcgacgtagaatgttgcgagacagatgcgcgacaagtcgtggacgtcagtgacgtgaaggggatatcgactggatcgtatcgagcaaagtaggtactgaccgataggaggcaagacgataccgaagaggaagatgacgaaagtccatccgtgatgcctcttgggggtcgggtcgaacttttgaggcaagcggtggttgtacgacatggtgtttgtcgtttgcaagattgcaaccgatgagcacggagtcgatgtggatgtcggcgtcgacttcggtgtggtcgaagtcgaggtcgaggttgttgtcgtcgtcgtgatagatgatgatgaaccgatgatgatgggaatgacgacgatgatgccgaggtgaggtgaggtgagagctctcgaggtgagttggctggcaaccagcaccggccggtcttaggggaggaagggcaaaggggaggcaaggcaggcaggggagacagagagagagtgaccggccaagacggacgggcttgtccgaagctcatctcttacggcatcgaacgcgcggcgcgtatgatggagggatttcccacgattccgcgagccgcgagccaagcatcctctcacaaaatacacaaacctacctacaatcactctgatcgaaatatccacaacttgcaacttgctacttgctacttgctactcgacctcgtcgacatatgacacgcaccctctgtgatacccatatctgaaagacttgatcgaactcagtcatgtggtaagctcacgaatcccgtctattctgacctcgattgccacacctagctgacaacatccgacactcctgcacagtaaacacgtcctcaacgctcaagtctccattcgagcaccatgctgtcaaaaatggttcgacgtgagccgcccacttgccctcagcctctccctcttcgatcgtcactgacgggtagtacataccaccaaactacctttctgctcctctcaagtgcccgcaatgtcatgcggagaaatcggatcatgaattgaggaaatcgaccgagatgcatttcatctgtaaaaaggtgagatccttcctccccgctgtcgacctcatcccaatccctttgcctcttcttcatcctcgtcttcgtcggtcgtatccagagaacgagatccagcaccgggcactccgaaactgaccgcatgtcactcttgctcgctcacgacgacacagtgcaaaaaggcgttcaggaaggatatcaaccagtacgaagagtcagacgagtattgcccgcattgtgataaccattacgtgagtcgaccccgcagcctctcgtcggggagtgatgggactcgatgcgcatagggagaggagagctgaccgggtcgtcttcgtcctcatcctcgtcctcgtcggtcgatccctttttctacgcggtctcatcgtcacccgtcaatcttcacccatctcatgtcgaatcgaccccgttcaacccgattcctgggaccggatccaactctgcgtatccctcatctccggtatccggatctgcccaactaccaaaccgtgggacgtgacaggtcatcgaggcgaaaacgccccaggccgtcctgggcgtcgagggtgaggacgcccggatagactctaggtacgtccctccccagaaccggatcgagaacactctctccatcgcgtcctgtttcgactgacacgaaccaccatcccgaccttttccttctctttgccttgccttctcgtccttgttcgcgcgacaggatgatcaaggacgaccgggtcaagctggatccttcccgctcgatctttacgcgggcggcagcggaacaggcagacaagctggatatccggccgagggcgggggtcaggccaaagggttacgaagaggaatgaatcgggggtggtgtgtctcctcctccttccccccggccgggctggactgggcaatgggttgtatcgaacacgtgtagagtgggtgtactgtaatgacatagatgtggtggaagcgttgttcgaggatacagggtgaagactcgaggggggatggtacattgaacagtgtagagaagtggggaccttggaccgtcttgacagactatcttgctttagaatgtctagagtttccagctaggggtcgatcggggttgaattggtcgtgatgacgaattctcgttggaccaagtttgggagatggacatgtccgaccaggagggtttcagatctcggacgaccacaggcccatctcatcacgatcaacggacgctcccgggtgtgatgagcagatacaaggatcgaacaagtagtcagatactataaagttccgtcgaatgacctagtcgatcgaagcagactcgcaaagagaacgaggaggacgaaaagacacgtctcggagcgatcaaaaggacaatggccatcaagaacaaggctgttggtgggacggatggacctggaattagcaatgacaaagtcagagtgccttcaagagacggtctcagtacaagtttactaggtaagctcgtcgggatcaaggcagtgaccacgagctgacacctctctgcaatactctagctgcgagttgcttcttgacgatcctgaccgtctcatcggccatcctcatcattcccgaccttcttcaccctctctttggctcgataccgatcaactcgtacgtcgacatcgtatggcccttattccttatccccgtactgctgctcgcggccgtccccggggggaggtcgtgggacatgggcccagcaccgatgttgctcgggacaaacatcttgatcgtcatcagggcacacagaaaggtggccaggttagcgggggatctcgcaggacccatgggaggtgcggcgggaacgttggtggctctcctaggacccatcgtcgtgatagggtcattactcttcgcgcaacgggccgtgagtcgacgggatgggccaggtgccaggttggccagggtgggaatactgattgcaaactcgccctaggacacgctttatcgccgtacgagggatgcgagtgataaacacataccgagagccgcattcgctctcatgtttgctgggcttttcaaagtcacctcgcaagctttgaagagtgaagtgggtcgagacatcgctagccaagtcggcgcggtgttgaggccggagctgcagacaccgatcactgcggtgagtctgagatcccgatatacgcgatcgagtgatttcctaacgagactcgatcttccagttggtggctctttcagctctgagcttgtaccaaaccaccggcaccgctcgtccagctgctcaacaggtagaacgcttcctccgggtgatcctcctggcactcctcgccctggtcactctgtcgctactccgccctactccctttccgtacactgtcgcccttctacccacgcctgcgcctccaggtgcacccctcgaccgacctgcacccggagtccggatcttgaactctacaaggagcttgacgggccagatcgttgtgggcgaaaacatcgagtatgggtttaggttcctgaggtgtgatcatagtctgctcggtggtcgatgggtcaggaaagacaagaacggcgaggacgagtttggggaatcgtgggtgttcatgcgagaggttgagctatcgagaacggagggctgacatgatcgctccctcgtagcatcttttccacctttgtcctgcaggacgcagtcaagttggtacaacggacatctctcgatcagaaacaacgacccaacgccgaggttatgtgagtgggatcgtgctgctcaaatgcacgcatatgatagcgaactgactcgacaacgcttcattcattagcggtttgggtgtgggaatttcagcacaggcaatgatgatggatggagtctcggtgcaggtcacaggtgagtgaagcgacagcaagcaccggctcgattcgaagccaattcggtcgccatagagatcgatccggccgtgtatcacgccgcccaccattactttggattacgaagaccatcccgtctcgtcttggacgacggcgcaaagtcgatcgagaaccgtgcggcggctgtcagatcggccggtcgactgttgcgtcctcgtgatcaaacggattacgtgatacatgactgctttaccggaggtagcgttcctgccgaactcttcacgaaggagttttggtgggacctgacgatgacaatgaagactgacggaatcttggtcgtcgtgagtggtcggcactcgacgaatcttgctggatgcggcggctgacgcacggtgttggtgctggatctggtgcagaactttgcgggtattctcactagccatgcctcccaggccgtgctagctactctgcacgatgtgttcccacaatgtcgagcgttccgagacagtcacgggactccagaccagtcgagcggcgaggaattgctcaacatggtaagccagaatgtcgggcctcgcacccatacgtgatcgtcatcggacgatgcccgagcctgattgagcatattctcggcacgctcaggtcatcttctgcactctggctcattcgcctctcatgacattccgcccgcccgacgcgaaagatctcgcgggatcgcgattaaagtaaagcttgggaattcgcttcgatgacggaacccgatcgacgtgctgacctgatctgagtatttgatctggttatagacgcgaagtcttgtcaaactttttaaaagacgagattccagtctcaaaactcttgcaagacacggcttcaagcttttggctgaacgatggcgctcgacggcacgacggaagcagtgacgacgggtacgatgacggcgacgagtatgaaggtgacgatgacgacggatatatcagacgggacgatcaggtcgtcaggacgcgacctggcgattccgatctgattcttcgtcgaggtcgaggcatggatcagctggatcgatggcaagtcgacagcgcaaaggcgacctgggtcgctatgcgaaacatcatgcctgcagaggtctggatgacctactaatgaacatgcatgaccatgggaaaagtgcaagcgggtgcaaggactagatgggcctgcggcgaggatttacatccggtcaatgtgaacgtgaaaaccctctactccggccaactgcctagcccggaatcagtccgaggaacccgcacacctcgcgctcgcttagacgcgctatggctgtgaaccaagccaaggacaatccttgcaaaccggaccacatcgacaggcggctgtgctacccggatcggctgatgaaacgcgactcctttgtaaacttgcacatgtgctcaacggcagaatcctcggtggcacacgtcaggctcgctcgaaacgatatcccggtcccagattctcaagtggctcatctcagcattctcgcttctcgtctatgggaaggagattccgctgctaacaacgctttcagacggtcagcagtaggcccgccaattgtgaatgtttccggtggctgccagctgactgggattctgggtagggggtgtgttcacaaacgaaaagaaacgtgatcccgctttcccctcgccctcgcttgccccggtgatcgttgaaatcacgtacgcacgcaagcggcgttctctttcgcctcgcggggcccgccctctgtaccggcgcgtgtcccgcaccgccttgtctctgtgtctgtgtctgcgtctgtgtctgtgcgcgctctgctgccgttcctgcgtgtggcggcgggcggctgtcgtcttgttgttcttgttcccgcgtgtcttagggcgagcacagagaccggacgcacaaatccgatcacacaattgtcatcatctaatcgactactctgttaatcgaatggatcgcccgtccgccacctgagactggcctagactggacggcgacccttgagagaaacaagtcggaggaagaggtgtaaacgtagtactatggcatatctaaaagacgtggtcgattctcctttgagatcaattcgccttctcccgaaatctgcggttcgaggagtttcatcatccgcagcgtctcgagctagtttagatcggaacgtccaaccgggccagaaaagctagaatagagatcgggtcgacaaaagcgacaagggaggtacatttccggggcacatagactctgcgtcaacaaggaccctcctttcgggctcagctacggtaatcactacatcctgccaggccactaggggcagtgctactcgaatcagtagtgaatcccggatcaagacgttcaatagatcagcgtcagatcgaccctcgtcaaatcaccatcaaactctagcagatcagcacccggcagcactgtcctaggatctgaaagctctacacatcagggtcatcgaagaaatctcagatcagcacaacccactatataatcaagaacgatagatccttcaagtcggtctcagtcagatcttagaagcagtgtaaaaagcgtcgggccgacgactcgacttgtgagtttcagtccggccgagctttgatcaacttcagggccccgggagaagcgagatgttggaaccgagacccatccggtgggatatttcaacttttgatggcaaaccttcttgggagcttcggctttcgatccgcatcgtcacagcctcaacctcttccatcgtcatcctttgatcattcgaccgcaattcctgtgcactcgatcaagcatgctgattttgacgtttcgtcgtctcgctagacatcaggcgatacctttttctttcccatcacctcctatactcgccctcgctttcctcgcggtgatcaacctagaacgtagaacatagttcgagaacagcttgaagttggatcggcgaagggcatatcgagtaagtctcggcttcatatccactctcctctcccctccacctggcctcgaccccgtgatctcggatcaagatcgatcgagcgtttaagaacctcgtggaacggcacgccggccgacgggttctgctgcctttgagcacgacgagacgtcagcggcgaaaggggcaaattggatttagatcgacctcgtggtagattttacgacgggtcgaatggtaggaagggggggatcgctcgcatcagaacaaccagatgggacgacgacatcacgaacaaagctccctttgatcaagaaggaaaaagggggttccaattggccgattcgacccgtcattccctttacaattagacatttccccatcaccatcaatatcgttctcactccgacatcgtcacagcgcacagcaaatgcgaagctaccgatcataatctaggaccgcagctgaccttgctttgactcctgatcttctgatgacaaacctcgtcaccagaccggtcgtttatataccctcaccaaggaatttcgacgtcatagctgcttacctcctccaactcgaacgggaacacagccgaagaacgatacttgatatgaggacttgttaattaccgtctactcgaacgcctaaaagacttggtgagatccctcttgtctcatcttgtcgactcgcaagctgatctcagtgctcgctcgccttgatccggttcgcagcaagaacgaaccgacacgatgacttcctctatgccccgacctggactcttgatgagcttcgccggaccctcttcttcggcttcctcgaacgactcgaacgcgaatcagcccgtctcgctctccaactcgtccgagaattcgcctcggtcatctgcgagctcgctcccacccatcacaccagaccttgctccggtcgcctctcatccacttcaagcgctctcgcttttgcccgggaccaataatcagagtccaggcgctctgcaaccttccctgacgcccgtgtacgcccggaccaacaccagtcttccggatcagctgccctccttcgatgacatccgattcgatcctcttggagggccgttccccgtatttggcaagacgtcacacgcagcggatcctcacggcctcaatgcatacctgatgcacccggaggatcagctgtggaattatctacagccccgaccgaggacttctgttgaacccgtaacgatccagcaacagcaatcgttcaaggcggacccgttcgtcaagccgttggccaagtcgcccttgggacgcccgcccttggttgttgggaaaccagagccgatcaacttgccaggacagcaggacgagcagaacgatgcgacgaagaaaggatcgctgaaatccaagctagggttcatgaagccgggtacaaagacctcgaaatcgagcacgagcctgagtagtctcgcagagggtccctcgatacgagcagcgaaatctcagccaggttcgccgacgacagcgtccaggtctgtagagaggatagaggaggatgaggtgggtgagcgatcgcagacctcacccatgacgatcacgagccctactcctggactggacgagcagaccatcaaggggagtccggtcctgctagagcagaagctcacaccggagagcagccctgtcgagacgagacctacgaatacatcgagatggagttggctaggaatggggcctaagcaacaacgcaagaaatcgggacagatcgttgtcaagaagcctaccgcactgcacgaagctgctccgctcgacccttcgctttcggcagaccctctggcaggtgtcttgcccagctcgatccccgccgacgctacaccggccgtcaacgagtcgcttcaccttctcacccgaactcgatcgcccatgccagagagcctacgggccatgaggaatatctctatcaacaagctatctgctctccgagctcctagtcctcatcccatcttacccgaagcggccattccggcgtatctcgcacatcatggatccgacacatccagctcgaaacgactgttgaaattcccgaggagtgtcaactcgcgacatttgcccgggatgggactcggaccagccgaggcggggatgaggatcgatatcggcgtgagggcgctgttgaacaagatcgactcgcaggccgctctggatctgagcgagattagctcggcgtccgtgttttcgtcgacgagcggcaagagaatgcctaacggccttaacgatctagccaacatcaaggccaagatcgagaaaaacgctagaaggggaccgggaatccctgccttcttggctcgacctggcttcgaagacaggatgctgtgttacgacgaagagggacagccttcgcccatccaatgtgaccgagccgtttacgagatcgagttttctcaaggtctcgaagccttgggagaggaggcgatgagacttaccagagagggcaaatcgagatactcgtcgtacgatgcggtaccaggtcgaccaattcaagcgagctcgcggtcggcatctagggaggtcttgcaggatgacgagcttaagtatggcagggcggacgcagccaagtcgagctctattcagacgatgccacgatccacctcgcccgtcaagttcccgaccatgcaagcgctaccagcttcgtctccgcaatcaacgctctcctccaagacccctcgaaaacaaaagcctatcaactgggctattgcgtcggattccgaaagcagcgaatcagagtcggaggaaagcgaaagcgaagatgaagggcgacccttgagtcgagtcgccacgaggcaaaaaccagtggagatggaacccctgaagagcgtcgctaggccgagtaacttgacccgcccgacttccttgatggtcacccaacagcagcaatcgagcagagcaatgtcgatggcgcgacctcctcttgaccgccgtacgactgacgagaggagacggaccgaggcggacctgacagccaaatatagggagcatgtcatgcagacgcgagagcgtcgagaccaagcccgggtcggtgttgtcgagcggcaacgagcgggcgatgcattgagggaaaaggagagggatcgtcgtcgatcgcttgcaggaatttctcctctgactatgccggaaaagtcgggacggagtgcccggaacacctcggctcctgtcaatcctcaccatacccgcaataattcggacatttcgacacagaacggcatgtctggtttgacctctcggccacatcgcaaatctacggtcgagccctcgcgacttaaccccgaatctgccaatcacggcctcggtcgccgctcgatgagctacgccgatgttcgtgcttccacgatgcaccaatccttcgcgaaaccccatgcggcccctttcatgacgcactccatgtcgtattctccgggtcaacccggggttatgtacgtcccggtaccggtcatgcattaccctcagcccggcatgggattcatgcccatgcacccgatgatgcctcaacaccaacatcagcagatgccaccgaactttgaccaaatgaggaggaagtcggtcggcgcccctattctatcacccaatcacactggctcgcggcacaagaacgcgagcggccaacaaccggcggcccagtcgtcgcggcccaccaaaagaacgcccgtccaatagagcacagcgattctaccctaatttcacggcatggacagtctctttttcctgttacttaacgaccgtctcgtacatatctttgtccgtctgtatcacaccgcattgctgtactagccttctcacaccagtagttccgtcgcctccgtcgcctcaccttatacgatccttcatgagcccccgacaatccttttcgggcgagaaagagtttccgatcggaagcagatatgacattgcccggaccatcacgtcgcgaccgagtcggatagcctcgatgagaagtagagaatccaattgactaccgttcagattccaatctgtgctagctaaagaggtttccattgatcgtttttcagaacgtatgcatatgttgacataaacatgaccttattcaacatcctggtagtcaacccgaactcgaccgatggcttcacgaaagtgggtccgctgccattcaaagcgaaacgcaatgtactcaattctccctccaggccatgcgttcgcacctgaacagtctctacgcagagagtagagacgtctcgttcaagatggtcacggctcctagtcacgcacctgcgtctatcacttcggtcactacctcggtgctgtccgcagctcattctttgccagtcattctgccagagctagagggcggagcatgtgatgccgttgtcatcgcctgtttctcggcgcatccactcgtccccatgctacgcgaattgaccacgctaccagttatcgggatcatggaagctggcatcttgatggcatctcaggtcggcagcaagcccggaatcgtaacgacggataaacgctgggagcctttgctcgaacacgagattgggggggagctgggtttgtcgcaccaatgcaaagccggagtcatgtctagcggtctttcggtcttggagctggagacgctacccaaagagcgtgttcatgaggcgttgggcaaaacggcttctcgaatggtcggaacaagagaagccgatgtgatcctgcttgggtgtgctggaatggtcggcctagccgaggttgtgcaaaaccatgttggtcccgatgtgaccgtcatcgatccagtagtctgcgccgtggaactggctctcagcttggccaggatgaggctccggacagctaaagcgggtcgatatgcattgtctacaatgtagtatacatttaatcttaggatgagagcgatagaaatatagatagatacagttgtgtaggtagcgggtcgttcagttgcgatcgcgttgaacagcaggcgatggggtcctgccgaaagaaggaggggtgagctgaagtacgggttctggaaattatcgatccctctcaccatgatcgtgtggcaggttccttgcgttttcctgatcccagattggaccaccctcccgtcctttccatcgcttcaactctgccacgagcagctcctcccgcgaaagcgctcgaaccgcttcgtcgcgagcttgagaccggtgtacccatacttctctccagcaaggttctcccagcaggtgtgagcgtgtcggcattacgcctgggcgtggcgcttccctcattttcaaagatcgagccccgactgacgggcggtcccatatcacccaacttgcgatcaggtccagaaagaatcgccagacctctgggtgccgtgccgtaacccttggcccgctctctcattgctcgagaggcgtccttggccaatctcctcccgatgtcatcgcgacgtttaggttcattgatcttgaaaccgccggcagcagagtcgagaggatcgccagattcgcccagagctcgtggagtactcatcaaagatccccacgtcatcaattgggagacagcctgaggtccaagttgctcgggggatggcgatggcgctgttgggactagcgcgtagtcgttgaatgtgggcatattgggaggctggcggtctgcggaaagatgtctgtgagattcggccaagtcgagctgaggtcaatctatccacaactcacatggcgtaccaccgatagcagctgcaacacggcttctcgtcggactagaggctctggcactgcttctcccactggtccgagacggctccaaatcatcctcgtccctcattctggtattgccatgcgagatctcgggagggttctgacgcaattcggaaaccgtggcagaggtagctggccgtttcaatgggtcgacatcggcatcgggaccgaacatgaatgcgtttctcgtctaccgatacccaatttgattcaacttggatactgcctagaccaactgcccgatgacacgggcgactcaccttgtaagcccacgtaggcaccaccctctcccttgaatcctgttcatctgccatgatggccttttcgatcaactctcttcgtttcttttccaattctcctctacccatcccatctcccgaaccgctggcaacgtctcgagcggggacgagctgcccgtcctcgttcatcaaagccgtctcgggaagacctgcctcgttgagcgcacgggcgaggtgcgaatcagcgggtaatgacaactctgtcagtgtatccttcgacggcagagaaggtccggccgcagcaagggggagggcgttcgggatgaccagttgctgttcagagatgtccggggcgttcaacgagggagctggccggatcatggttacagcattggcgtttccagactcgtttgcgtcctcgccatcaagagcgaccagagccatgacttgatcctcatcatcagcatcctcctgagcccgccctttccctttgtccaccttgatcaacgcttgctgcgacggtttattggccgattccaggtctgcaaccgggtttgagactgcgaccgactcgatcatgagcatcttgccgttcgggccctggacgagctctttcctcttgcgggagctgttttgggcttcatcccccagcgtcaacctgagtaatccgtcgtccgtgggcacgtaacccccgtgctcgatcaagagccgccgtcggtcttgttccaagcgcaaccgattcgttttggcctttgtctcggcttcaaaggcccaagcgaatttctcttttcgacgggcgttatcctcggtcaagatctcgaggaaagaggcgttatcctccgaagtgtagacgtgttgaaaatcctgctcgtgaagcgtcagcgcgaacgtctttgatctgaagaaccgaacgacaagggaggtcgtagactcacatcaagtccccgcgatgtatcaatctttcttcgtttgatttcctgctcgtccctctcgtcctgctcccgctgccgatatccaggtaaaggggtctcgagatcggcacctccaaacggtgtcctcgagatgtatggcgtgccgttatactcggccaattcggcctctctacgacgacgctctctttccaacctcggagtactcgatcctgcagggtctgagccgagggaggaaagatcccggatcgaagaggcgagagcttgcgagtcttgggattcgagagctgacaaataggcgttggtcgcagcgagacgaggtagggtcggaaagaagtctctcttgatgatgtgggacagggaagccgtgtattcatcttcctatcaatagaaatcgacatagtttttaagcaggtgaaattgctgtcaataaccataactcacgtctaacacgacttgtttggccaggctgacgcctggcgttcgagaggatccgacctcggtcgtacgaaccatctgtcgactggaagatggagtggcattccgactcatcctatcgcatgcctcttgaggaaggtgtgcggttcgaggttgtgtcggttcatcttgcattgcacctgatcacacctgattgacatcccctacctcccagtcgctctcatttctaaaaacgcataatctgcccgtgatttcgtcgattttatgcgttttagcattccgacagctcgacctcggaaagaagagaaagaatctcgatgtcgccagacaattattcaacaaggtggtcttcaagtcgacctggtaaccacagctttcgcatcagaactacagcaaatctagtcatcgcggtgtataccccagtctaggcttcatcttctgtcgatcatcgaatctcccttgacaaaacaggatcacacgaccattcggctcgatcatctcgaacgcggaaaaaaatgttgacagggaccaagtcgatcgtgccagagctttgctctatcgcggggagtagcatgagacagacggcgtgtaagtcgctgagagttttgctcatggtatcgccggctcatcaagctgatcatgtccgcttccacatcttcttggtgcggctgttatagcacgacgactggcgaccagtgcacaggttggtttggaggcctcgatcgggtcgtcctcggcatcaacatcatcagcaatggcatcttcacccctacttggacgaacgaggaactctacctcgatcaaatccaccgtctccccagaaaaggctagcgactacctctcctctctcctcgccctcccatcctcccgcccattcccggctcccctcgctttgagaatcctcacgcacaaatcctatcgaggcgcccaggtcctcggtcagggttacacctcgcgaatgactcagaactcggattcatccacacccgtcgcaggctcggcgggacacaacgcccgattgacctttttgggcaaacgggccatgctctcttacctcctcatgttcatccaccaacacgcgctggataccaaccggcctataggatccgaattggaaggactgggactgctgagctcgaacgacaagcagatcggactggagaccaagttgcagaacttggtcaacctttcaaacctggggaggaccgtcgggtcgaggtgggggatggagcatgtgatgcgatggcaaagcaacctggtgagtcgttgcgaggaggcgcccccgaggagaatcttggtcgctcattttggactgtttaccattcgtgccgatcggtagaccggagaaggggccgaatctcgggattcgggagcgctgaagatctatggcgaaggagtccaagccgtcgtcggaggcaccatgatgcaattcgtaagtgtacaagctctttcacaatgaaagaaggattcgagctgatatacccatccggctcatccttggtagggttcacccgccgcacaacggttattccacctccagatcctccccaccctcgccacccagcttagagacccggcattggtcgcatcggtagacaagatgaggagtaagatcgtcaacgagatgggaggggagaagtgtgtcgtcgcatgatgcagttcgagagggagggttgtggcacatgagggctagtaatcagaatatgatatcacgatgaccaaaaggacacttatgatcgggctcggtgctatttgctcgcgctgtccatgatacacgaagaagtggctaggatgggactctggtccatgcatccaggtatgcgctcaacctcgatcgcggctgggcgctgtgggtgaacactgcgcgcctcgaccactgctcttcaaagtcatactgaagtcggtaacagggggtaagtcaaaaagaccgttggacaccatcgagacctcttgtcagcatgatcaccgatttccagctgagcagctaaaccagacttcttgtgatcgatctgaacatcaagttcattatccagatatgtataatgtacgcacgactagcttttaaaacgtctagcgtaagtgccattgtaacggaactccttgggaggtgaattatcaccttgatctcggcctatccggctatgtccaccacccttggattggattcggtccttgctatactcatatcgtgaccggctcgaacttcgtccgagtcggagggatttttctggctatttcgtcccccttgtcggcaaacctgtcgaagccggagggcatagtgatttttccgatatacgatctttgtacccggtgcggtcgacttcgctgacatgaacccggtagatatccaagtctatggtatctctcatttatggtggttgctttgctcgagatctcggggtcatgaacgatatgggcatgagccacgaacgacctcaaattgtctaggttgggcaggaatgcctggtctgtgttgattctattgcgaagcttccctacattctagcacccttcatgcaaccagccgctagttggacacctccgagtgacgttcgacatcgtcaaggacgtcaggatgagggtgtacttggcggggccggtcgcacggatgtcgagccatgatctgctactaatcagatttggcatcgcatttgccggtctgagcgtattgccttgtttctgctacatccctgttgttcgagtactgggatccgtctcttgatcgccgtcttttgacgcctctggactatgttggtacctgtaaaggccttccccgagggtccaaatcgttgtgttgttgtaaccatagatcttatacttgcaatttgacgacctgtatgccaccaagctcatctttcgagtacgactaggcagtcccaccatccgctcctcaaacggtgaggctccgacgctcaagcacgacgaaacgtggttatcctactgctacaatacgccgcacgtcgactaggatgggtgggtgagcacttccagatttgcattcccagtgtggaaagtgcttcggactcgtgacgatccgccctggaaagttgcatactctggtcatcgtaaagctatcggtgcgcctaccaaggtggagttgatacaagagccatttttctgtatgacgagcttttagcagaggatccgtgtttaccgtagttgagtccgagtcggtggtttccaaggcgacagggattgaacgtccagcgcttttgacgacaagcggggctgaccgatccgcttcgtttccattctctcctcccggcgtgatatccggttgggaacgcttacgcttggttactggtcgcaaagaaaaggacgggtctcgggccatgccagatgaaacagggtcaccaggacggaacatctcgttgcgttctgaatcgagctgtgcggcgtgttctagcgctcgtgtcatatgataccaacgtctcgaccatcagaatcgagaaaagctgtgtgcatgccccatgtgacccatccggctgatactcgtccataatccataatccataatcctcaatgcgatgaaagagtcgttccttccgtctttgcccggaagctgtgccccgttgaaatctggtcaactgaaaagcggtgccagatccagggaccgcgtcatcttcgaggctgggttctagctcggaaccgaaaccgaatagccgaggctggtaaccacccaccaaggctgtgagggaggcttttcctttgggctaaggggtacggaagccgcggttgtcggaccgaccggataccctttggaagccttgtcttgggggaaaaggtggatcacgagtggatctgtcagaggtttccgtttcaggaagcaacgaggaggggatcagatgacgaaagggggcatgtttgtcaaaggagccaccatgcaacacagccaaccaaaatagaatccatgctagactagaaaccgcttggcatcgaaaagagcaccgatgatgaatatccatataaggtcgagtggagggagtcgacgacaacatagagagactcgtcgacaccgtcccgtcggactctcacattgaaccaaaagcacgcccccatcgccatcatgctgctactcagaacatcgaccctcatccctcttctcttctccctcgccctcacatcggcgtcgcctgctcctcaaaagcgcacaaccacgctcgacaatggttcccaggtcaacggaaagacttacgactacattgtcgtgggtggtggactcgccgggtctgtcctggccaagagattaacggaaggtcaaccgggaaggacagtactcgtcgtcgaagcgggacaagacagggagggcgatgaaagggtctatggtcagtctcttcaactcccggttctgctctgcctgccccctgatcgctgatgatcgtatgctttcccgtcgcagatgcttcccgctaccaatccgcctttgacaccgagctcgactatgctttccaaaccattcctcaaccatcttcgtcctcttctgaacccaagaccatccgagcgggaaagatgctgggtggatcgacggggatcaacgggctcgcttggagcaaacctcatgacttccagatcgatgccatggtcgcggtaggaaacgaagggttggattggaactccttgcagggatacgtgagtattctcgggttcgtcttcatcttcgccgggcccagatgctgatactagacggaacgtgggctttagatgaggaaagcggaaggtttccaagctccttcaggaggttaccagtacgatcccaactgtcatggatctggaggacccatcactgtacagttcgaccgcagctcgtaagccgtccctcgtcctatcactccgatgcgctggattgcaaagctgagcgccgctcgagagcaggtcccctggcgatttggagaggtctttcagtcagactctggacaacctcggattgccttctgctcggtaagtcgtattgcagtagggcttcccgttggaccagggctgacaggggccatccattattcccgacagcggaaacgatctgacgtgcggggatcctgctggatcggctcagatctccaataccaaggacgggaacaccaggattacggcctgtgagttcagaaccgcctgctctccagtggacgaggtgaaaggccgactcaaattctgcccgttgtgacgatcagaccgaggatatctgcgtaaccaggacattgacaacttgaccagtgagtcgtagcgagccagcaacgtccggtccaggcactgggacttaccatcagactcgattctgtagtccttaccaaggctcgagtcgggcgggttctgttgtcggaaggttccagcccgtcggccacgggtatcgagttccgtgacgatgcaggcaacacgtacaccgccaaggccaacttggaggtcatcatggctgccggttcgatcatgtcccccgtcatcctccagcactcgggtatcgggcccagctcggtcctgggatcagcttcggttgagtccagggtcgacttgcccgtgggtatgaatttggtcgaccaggtcaccacgaccaccaactggcgattctcgggtagtcggggtggagcgcaagagatcttgttccctagattccaggacatgttcgagggtggagacgcagacaggatgaggagcatcctcgagaacgatctcggccagtacgcccaggacgcggtcaacaacggagctgctacgaacgctaccgctttgaggatcgtcctcgagttgcagcgggactggatcttgaaccagaacgccgggatcgccgagagtttcgattactcgtatgataccacccttggatacgattcgtggttcctcttgcctttcggtcgaggttccgtcaagatcaccaactcggatgcctatgccccaccttccaacgggttctctatcgaccccagatacttttccaacgactttgacaggctcgctcagggcgccatcaccaggtacaccagagaggtcacgtacggctcccctttgaacggcaagattactagcgaaggaactccaggttacgacgtcggtagtctcgatgcatgggcgaattggtcagagtccaactacaggagcaactggcaccccatcggtacgatcgccatgatgagccaggccatgggtggatgtgtcgattccgattaccaggtcgtaagtcccactggggattagtgtcgagtcgactcggggtcgtcctgatgatgagagttgtattgttttcagtacggcgttggaaacttgcgagtcgtcgacgcttctatcctgcctttccaagtctcgtcccacttgatgagcgtcctctacggtctcgtacgtattttcggggacctgtctactcatccttcatcatactgattccctgttcgatccactatcaggctgaacgtgctgcggagatcatcctcgctgccaaccctggcggacaggacggtggtggtagcgacggcggtaacggcggtggtaacaacccggaccctcaacctactgcgggccgtgcgatctaccccaacggggacaacgccaagtgtctcacggtcaacggccaaccgaccgatgggagcgccgtcgtgtgagtcctatcgaccgcccatgcccacggagtacctaccgtgctaacgatcgcgtctcatggctttagaatctccgactgcgtctcgaccggctctggacagaggtggatcgttcaacggggatccacctcggtgaaactcgccggaaccaactattgtatggatgcgggtgaacgaccttcgaacggagtgaagagcaaaatctggaccgtgagtcgtcgtggtttccgatcgatcgatcgatcgagcggatcgaggttcagtaccgaggaactcaaaggttttcctctccttgtatctagtgctacaacggcttggccgcgcagaaatggtggttgaccgacgctggggacgatcatctcgccgttcaggatcaaggtcaatgtttggacttgcccgatgggaacaagtcgaacgggaacgtcttgcagacctgggcttgtgatggaaacaaccagaatcagaagtggaccttgtccggatgatctttgagcgacggagcgagcgagggaacgagcatggacaatatctgggcgaaataaagagtcgtgtggatcgaagcgagtcaaggacaatttgctaccgacggaacttctgctataatcgtgtaattccaaaaagaggcgtggtccgcaagcgaccccatcgcatagtgtcgatctgttcgacaatcgccgtgcccctatgagcatccatttatattgatcggagatgcacgagggcgcgagaggtgcgttgctgattgctgacagtgcaatgtgttggcgggtactcccgtcgatcacgcttttgacgagcgtcgaatgaggcgcaaggcactagagcgaggctgcgatgtgtgaaccacgtgaagggttgacgcgggataggcgccagatctcccttcctgcccgctcgctcgctcgccttgttgctgctctgctgacctgagcgagcaaacaaaagacagaagggtcagaaacaaagttccacctcctttccttccgcccctggggtgtgtcgcgtcgttcgctacaagctacaggcctattccagttgtgccttgaacgatcgtcctgtgccatgcaacaacgcgcgattagatggatctcccgaatggccgagccctggtcgtcaacctgcgaaacggacaccccagctgatggaaattgaatcccttttgattaccccggcgttctctttgggcgctcacgaacgccaggggccggcaggcagatagactttgatgagcatggccgaggtcgcggcttgcggggaggcgaaggaaaggggaagagagaggaatcgcggatcgcaccccttttacccggatgacggaatccagacgttttgcttttccatcctgccccgatgattcgaagtgagcctagcccatgtctggaattatgccatttgcggtcaggagtggcacgggtggctctctcgggtctgcctcgcttcccgacaaggcagtcaaaggtcggtgaggctaggctcggtcggtgggctcatgagcttacaaagctccgaaaggaaccagcccaatctccagcgcagccaaaggagggactcgtgatccatctgccctagtttcgctcggtcatatctcataaacatcaacctcgccgtcagccgggtccgtcatcatcagcatcaaccccccattaccattccgtcgctcgacctctcgcatccagaagagctactttactccctctaaaagtcggatcaacttcgcgcggtctcactagtctgcccccccttttgatcggggaacgagcgagacgcggatttatcctggtgccctaaccacgctcaaactcgctgatgtcgacgacacccaggtggatgtcatcatccgatatcgaaaagcgataacattcaccccactcgtgtggatcaagaggagatttctgaaaaccccacatcctctcagcgagcctcgaccgcatcaaacacactacgaggcgtttggagctaagataaaccaggctaaggaaagagggaggaggcctcataaacacccgtcgacggacctttctcgacgtttggatagcttcgcgtctcacgatacaccgcgatcaaccagttgcacgacgcaaatcgaggtcgagctctaagctgccattatcgactcgacatagactgaagggcgaagaaaagaggccgacttggactggcgtgtcggaatcagaaatagattgcggagaatccgatatcgaggacggtttagcgggaacctcgagccaatctcacaggaccgacgggaggcaatacacctattccattaccgacatgtcggcggatcaccccccatctcatcatcacctcggtcattacgtccaccatccaagtatcaatcaaaactacaactatgtgaacaaggccaagtcgcactactgcacgtacgatgggtgtgaaaaggcgtttgcgacggtggcacatatgaagcggcacctaaagacacgtgagtttcggtcgagtcgtgagacctctttcgcctacaggttcggaataatcataatgttcacatgattgatatgcaccacgctgccgcccgaactcttgacgaaacatgcgacttgtacggggaatgtttgattatgacccaccctcgacccaccggacccaccgtaactacctttgccccggccaccatccactgtcactggtcaacatcatcaacgtccatgtagattcgggacttcaaccgtacgaatgtcaatattgctcgaaacgcttcggacgaagcgacgtcaggaacaagcacgtgcagagtacgcacgagggggacaagatggggacagcaggcagaaggagaaggtgggtgtgtcatttgctttacacaaggccagagcacagggctaagattcgggctccatacaggacgatcgcagaggcagacggaaaggagaagactccggaaccgggagatgacgtagagggtcactcggccggcggtggcaaagccaggtcgtattcaatgccaggtgggtcgcgtcattgatacagtacccctgatatcttgctgacgttagcaagcaccattgtagggggctcgaaacgaccatcatcggcagtcaagacggagcccgtgtcccccatctctccaactactcccggattacccgggctggcctcttttgggtcatatcgacctcctcggctaggcgcgttcgaagagtcgaccgatgagagccgatcggacgcgacgaatcgcagagggtacgacagccttaatcagaccattgcgccgcggcctgtcaactttctgaattacatgccaccacctccgtcggcttcgtctatctccacattgtcagccgcgggtttaccaagctcgacctctatctcatcgggaatgtcgtatagatcgccgacgaataaccaattgccaccgatcaagtgggacggcgggttcttttcgggatcgaacgatcagcgatcaagtaaacgtagccaagatgaaacgccttcgtacttgactaccgggacgcgacaccaaccatcctcgtcatcctcgttgacagcttcctatcaacatcaatcgcagcctaatgcgagcagtctcccgatgcactctcagtcgctacctcaaacgaaccagtacttcaactctcgatcgatgctgtacaacacggatcaacagaacaacccaacggcgaacaacttttcctcgtcgacgtccgcataccaacccggacatacgccatccctgtctcatccgccctcttactctctacccttccccaatacggcgtccaacaccggattcaatccacaaaatcattcgacctcggcgcataacaatcacgtcagcccgcccgacctcgacttgtgtatcccccgaacgtcgatgtatggagatggacccgtctcggctccggttcaatcggatcatgtgcggtacggttcgataccggaccttggcgggactgggtatgagatggcgaggtccgcgtcgaatcatggtaatcggtccaatcagaatcatggaggtagtagacagtacgaaggtgagcacggtgtcgcagtcgaaagttgacaaagccgctcgccaaaagctcacataattgggtccagcagattacatgaagagtatggggttcagaaatccctttgaaggtcgtggatgaagatcgcagtcgcgcttgccaggaggagcgacatctgtaccattcaactacccacactttacgacatacacgaccccgctacctcgtcaccgttgccacgacgagggagacgacatcaagccttcaacggcaacggaacctcttttctccttctactcgtgtacattagctgtccttactgcttgcaagtgctttctctcttcgctctaggtaaaggtggatcgatatatctcgctcaagtgacatgatcagggcctacatagcatgaatcgatcctgtagttacgtctgttccatgtctgcttgtttttccgcttgtaccgcaaattgaaacgtgcaagaaacagtggagtcccgaatcgtcgaggtctggatctagatgagacgcgtatcttcgcggactagaagctgaaacattgaccgtcctgacgctcgaaagctcgtcgactggccgtccagcgggagaccggtaccatgtaagatacacagggaagtaaccatgacggagccaggaaagtcctagccatttgaccggccttgtcaagcgaggcggaaacgtcggtctttgtttccgatgtcctgttagactgaccgagcccatcgtctccattccataccatgctgtgcatttgtcacgcaatgcagttccctccatctacacctttcccctactttggtcgctcatctggctttaacgatcctcaaggacgattgtcgctgcgttgcggtggtgcgaactgaggcatggccatggccaggggccaaatatcatgcccgatcgaccgaccgaatatcaagtctgtttcactcttcgtatgcgggactgatccacttcttgttgaatcagtggctgtgcctcgactcatattgtcctttggcccgactatccgaaaggtgcaaacccctcgtctcgaaatgcagacaattcggacggattaccggttggtatactggtcggtgggaatataacgccagagcccgcatccgtccgtctgaatgtaagcgagtcacaacctctgcgacactggcgtaagaggcgctcaaatgcctatatcaaagtcgaacctcctctccccctctttgcccgcccggtctcgttcgataaagaggacggagccgtccttcttgacgaggaccagcgtggacaacctcgtcccatatactcttccttcgggccgagtttcatctcgagtgacgttgcgaggtgaatttgcgggtagagggccatcggagggcatcgcaaggagagggacggagatggattggtgtaggccttccatggatgttatgggtccatggtcagtgctacaagtcgcaaggtatttgtccgcgtcagttcaagaaatccggcatcagcaatcaagagcactacactgaccggagaattgaaaacaagtcctcgatgagcgtctcttgcgtagacgtggatgatcggtccatgagatcagacaagagccggttgccttccttgaccttgtccagcggctgagaaaggagactgttagacatcccccatggccccgaggtcgtctcgtcgtccacctggaaatgcgaattcgatcgtgattctttcgattcggcaagtcgattggaatagtagaacgagacgatctcgatcttccgctctgcgccaggtgaggaagacgggcagatggtcacgtcgaacaagcccaagccgaacccatcatagcgtctcttttcctccctcaagatccgtaggtacgccttggtatcgtcctcgttggagagctgcagataatctttgagaataccgcccctgcttcgttttccagctggaccggggtcgagcgggatatcatcgtgaatgttggtcaaagctccgatgcgcaggactttcttcccgtgcgtcgcgcatgtctctgggatagagaggccaaaccacgtcccgccgactgggtcttgagcgtctcttccggacaagcagcgagtggtacgtatagtatctgccccagatgctgaatcgagaggttcaaagttgtggaaagcggcatcgcgggtcggccgggacaagtattcgtcccggttggcggcgatgatgagggcgtagggcgagttcgtgacctggggtaggtggggggtgtagcatagtatgatgcacatgtttcggactaggagattcgactagacacaatacagggaatcgagatccaatggcacgataatgcgaatgaatgaatgatctgatggatagcaggtaggagtttaataggtagagtatgacgaatatggtgaaatcgtcgttgaccaagagattcttcggagaccacacatcatcatcgtggagagtgtatgacatcttgtcatgatggtgtatatactactctacttcactgccacttactacttgctacttgcggaaccggacttctagatgacagtagccagtaggatgtcttttccgtgaaccagatatcctcgaactgcaagcgaccgacaccagcgccatcatcaataatatactagctcgtcttgcaactgagcgacaaaaacctcgttgcaccgttcaccttcagccatcacgacacaagcatatcctcaacaaattgatccatgcgcattattgcctgattactcacggcatagaccttcgaaatgtctggcaagatgaacgagagcgtatacaaggaccttacggacatggggttcgaagaggctcaatgccgacaggcggccatgtgcttttccgatgctcagagtgcgctcgactggatcttcgcgggtggtaacgtgagtggacaggcaacgacctgtggagaaaatcgggatggggaagaggtattcactcgaggctaatacactttcgactgtgaatcgacagccggcagatttgccagcacagggaccgcccgattggcctatgcaaggaccttccaacgttccgacccggaccaacactcctcacagggtcgctactccctctcaaccgagtccaacggtctcggatttcgatggggacgtttggagtcaatatggaacgtctcggaacaaccaaagaccagcagcgcgttagtcggcacagtttaccctgttttgctttaccgccgtcacagtccggctgatcacgctaccttgtgatccgtgtgcattcggtcacagcggtaggaaacgtcaccttccaacctcagggaatgtcggaagaagaagcgatccaagcagccattgaagcgtctcaactatcagcgaatgcgttttcgaatccacatgaccaaatatacgacccgccagcggcacctcgaccagagtatccaccacctcctggtccaccaccggtttcacaatcgtcctccaggagatctatcgatcgaagaggcacgagatctcctaccccaggcccgcccgagatcgagaggcgaagagaaggctcgatccacgcaggtccggtcatccagtcgaacaatccgttcaggcaggccatgcagccgccctcgagtctcccggatcccgctcacgagcagcaggtggaaggaaatgtcctcagcgtcccggcgaccacatcggcgaaaaacgtgcactttcctccttcagtcattcctgcgcaattggcctctgggtcgggtggaggaagtctaccggggtcagggttgaagcgggtggatgatacggtcgaggatgacgatggtatgcggggaatggtcttggtcccttccaatgctgatgagagtaaagggacggagacggtaagtcttgcgcctttgctcggactcgatcattcttgcaatgtcaaaatgctcacagatctgccctctgatagagcgcaacgtcacgacccgctcgatcatcacaaaacgcagtggcattacatcgaggacgctcggacagtcctccgcctactatggatacctaccctctcgactcggacgaagagagcgcagcgatcgaacgcgctatcaaggcgtccctttcgacagcctcaaccgtcaaggatgcagaggacgaggagaacaaggtggacagagacgtcaacgttgatgcggagatgacagacggggatgtacaagcagcagcagaggctctagtggactggaggcagaacgaagacgaggacgatatcatagccacgaggcagccgaacgcgtgagcgaccgcttgccgctcgatagcgcagcgcgtgtggatcttgctgacgcaccgatcgatcatcatagaccattggcgatacgaagcaagatggcgaatagcgtctgggcggcccacgtcctgcaggcgttgatggcgataccggccatccgacgggccatagaagatcgggatccaatggatgagcggttgattggctggcgtgagtccgggtacggcattaaaaatagacatggaggttgattcggtccattctcagagcaagacagagacgctctggatttcctgacgcagctggtccaggcacataacgatacgagcagagagtataccaatgtgaccctcaagctagaccacttcaatttgaccgcagggtcgacctacttgaccagtcctacatatggtcagcatcgcaaggtttgagttcctttgatggacaccactgaacgcttggtatcgtgtttgtagagatgatccggaccttgttacgagtgctcgagcctgagcagttcgaatcttcggcggtcaagccagactctctcgaaccggcggttatcgacgtcggccttgtggaaacgatagaggcggatgagacggacgtcaaaccgatcgataccccttcgggcgcacgagaggctgcgacacctgtagccaatttacagctaccatctgagccggagcgaaggtaaaatttcgttcgaggctaagttgcatggtctttgctgacttttcttttgtgctagcctgttgacgagtcatgtcaaggctctccaggacgatgagagggatccgcgagatctttgctggatcatgacccacgacgctctacagagcaagacggtgtcggatacgatcgctgcatttttcgaaggtcacaacaaggattccgggttcactcgcttgagtgatgtgttttgtatcgcgatgaagaaggcagatcgcaagcccggtcaatccgggggcgaggttatggtcgagctcgaggaagcaattttcatgggtgagcagactcccctcgcgttttgggtcatgtccaggaccaaggctaaactttgctgtgcttcagaccgcttcttggttgacaacatggaccaagtcaataccctccagacggagcagcaagctcttaaagcaaaaatcctggccaggcaagaagagattgcacagctgaccaagtacaaggggcgagagatcgagaaaatgattgacaggcgagtctggtgtcttgactttgtctcggcgcgtgcttggggcgatgctgacgagcggtacatcggctcatcaggaccatacagcactacgagagtgaatacggtccgaccggaagtgaagaggcggtcagaacgatacgtaccgcaacaatatctcaagcgagtcccatggccaccgaaacaaaccagctcataactgatgtttgccatgcgtgatagttgcaagcggtgaaaacgactcttgcatctaaacgggatggcaagtgatcattcccagatacgcacttgaccgctcgagactgacattcaccaacagaattggtcgcttccctcagggcggacgagacagagttggcctcgctgtgggacaagccagagctcaggcgaaacaaggcgagtcgtctccgcacgtggccatcggttgttgtactaatgacgcaacggacattgcagtaccaccttcatgccgtatgtttcaacagtgggtggacggggatgaatgccatacggtcttatgtcaaaggctctggagaccagtggtggcggttccgcgagacgatcatagaaaaggtatgtggggtccgattatctgaatgttgagcggctcctggctgagtcgtgcccctgagtgctttcagacatctttcgcagaactcgcggtagagaattggggtctgatgtttgatcaaggaccattcttcctggtttatacccgagctgcagataacccgccgagccgcagtaaagctgaagagccggctcggccattggcatctgcagatgttgcaacagtcaaggtcgagacggcggacgctgtcgaatcaacacctggtatggtgcccactgaggatctgttaggtcttgacgtagtagctaccgatgccgtggccggggtgaagaagcccgaggacacccctgtaccgctgggatgatgataaccctgccgatcgatcatacccaactatcacgtgacgtgtttcatgacttgcgggatcaatgccgcacctcgctcgtcgggatgaagttggtccgaggattcgagatcgaccggttccaaagtttagacacgggtaacgaagtcgtccggcttggctaccctctactcgcatacgctgtggtcgatcccccgtatatatgtgttggatgtcctccgccgaccgcacgccaatcggcttaatcctgtacgatcatcgttccatcgagctattcatcgatccagccgtgatcccgtcaacaaactgaactcacgcacagaagccgactgtattttaccatgattccggggaaacagaacgctcgtttcgtcgagattgccgagagtctcaagccagatctcaaaacgaaggtcgagcatgctctacgcgttgttacggtcgagagggatgagtcgtccgtcatgggatggaaagccatcgacgcaggtcgggtcgaggacgttggttcgctgaatgccgatcaacaggtgatatacgactttggtaagcctgacttgggaggatgaaccggaacgtcgtatcatcgttctctcctcatggttgactctgcttgcgacaggaggacacagggcggggaccttcgagtttgacatcgagtcggttctcgtcggcgtcgaaccggccgatgctccttgccgagtcaagctagttttcggcgaagtactgaacgacgttgccgaaagctttgacgattacaagcaagttgtcttccgtctgttcgagttcacatgacagtcaagcagagctgatgaccgtatcacccacagggcttgggtcagcaagagttggctgccggacgaggtgatcaagtcagtcggctcatcgcgacctatggcaagatgtcatgactgatttgaatattgaaaccagcatcgactacctaccagcacacgtacacatgccaaggcgtcatgcgttccgatacgtcaagatcgaagtcatctccacatctccccgatacggcgtcgagttctccaacccgatcgcaaacgccgtgacatctgctccatgggaggacccgtcagagctatctttcgtcacgaaggggaaagacctttcaatgcaagagaagaaccagctacgaaaaatcgacgaggtcgcgctgcgaacgttgagaaactgtatgcatacggtatacgaagatggtccgaggagggacatgcgactctggtaagcatagggattcagggctacagcccacctggccaaagctgaccccatgaatcgggcggtatctcctctcatcaggatcggtgaccttcggctgcaggctctctgttcatatgcgacgttcaaggacttcgatctcgccaaacgatgcctgtatctcttcgctggcatgccttacaacgacgaaggattactctgtgcatgcgtctatgaaaaacccaagccatatttcggcgggaattcgatcggtaaacacgaggcccatggccatatcccgttcttgcatgagaaactgaccacagggcgatatcgtagccgactatgccatgttgtttgcggtaacgctcctggactacgtcaaggcctccggggacaaacagacgggacatgacctcttcgaaattgccgcacagcaattcacgttcttcgcgcccaactataccgatgaacttcgatacaccgttccacccgctggggatgcgtcggaaagctcagcttcatggcactttgtcgattgtgagtccaagacgtggagactcgtggcgaatatttgacgtgctgaacagttatgttgcgcaggggagcccaccttggaaaaagaagctgctgaacatgcgatcatgatctactgcttgaaggccatctcggagctcgcttccatactcgagatcgagccagaaccttcctacatcttgggaacaggaaaaaatagcgaaggtctctcgacgctcgttccgaaactgatcaaggcgcacaacgaacattattacgacgccgacttgggcgtctacgtcagcgggccggaacggcagatcagttggggaagcaatgcttgggccgtgattgcgggcattcccgagacccaggagatcgcacagaaggccatcaaggcggcgtatacccgatcagagagcgtgcaaggcttgactccgtacctgcatcattacgtatgtcctggctaaatggaacccccttcccagcgcactaaccgtagcgcatgcataatgtcgaactcagctttgcgatgcctttattgtggcggggctggaggacttggccttgaaacatatcaaggagtattggggatcgatggttgaggccggtggagagacctttttcgaggcttggcaaccgaaggagcctagggcatcgccctacggcgacctgcacagcaattcgtaagtgcatcgattttcagaccgggcaggtgattgaaagcaggagctgagataatttgccatagattttgccatgcgtggtcgtgcacaccagcgttgttgcttcgtcaaatgggtttcgagtaatcagatgggtagtgtaagggcggtgcgacgacaagcaatgctatgcgcactccgatagctgcgcgatcatagtgacagacagggttgcactgagattgctaaggtagtgagcgttcagatcgctgagcatctaatctccaagttacgtgcccggtctgaatctagaccgagaaccagagtacttgatgatgattagttgtgatcgtgaacatgatgacgtgtcaaactttatatcgcacaaattcgatcgagaatatgacgaatggactcacctcgatcgtagccttggaagctagctgcaattaatatgcccctatcgacttgtaatccagcagctcgtaacatctcgtctcggtcatctacagaacaagcacgcacacagctttgaatatgcaacgaacaggtcactctctccgggccgtcgcctccctctcagcccgccgaatcccgaccgcgttccggcatgctaccccctcatcctcatacgcctctctcgcatcggaacaaccatccttggccacttctccagcaccgtttgaagtgttcgatcggtcggccaagcggaaacagcgggatagggcggcgatgagggcggacgagaagacgggggaggtgggagccaagagcagggttacggattacttgaagaacgaggtcgctgagcgcatgtttgagcggttcgaagtgggtcccaaccaagttccgcctgtctggtggatctatcaagctgagctgatagcacaatgtcgaaaccaccctaggatctacggaaacctcctgcttccgtgctcgacctatcttcctcctcgggtcagctgacgaaactcattgcctcgctcgagacgacccagagtatccggatgatggatcatagcggttcgtccgaagcctttcgtaactttcctcttgcgtttcatacccatacacttacacttgtttgttcatatccgtagaaaagacgctgttccgtgaccctgactcggaattcgatcgtacgcccgcatccatcctgtcccccatctcatcgcgacccaatcctgacatgaacctcgcttggccgggacagtcgcaccgacccgatccgtcgtggacgaggaagccttgttgacgcatatcgatcaggacagtcaagaagccatcgtcagcaacttgggattacactgggtgaatgatatcccgggtacgtgatcgagcacgcaaggtcgagaagggacggccatagctgatagcttgctcgatgatgcatctggactgtggacatgattaggggtcttgaagcagatcagacaggggttgaaaccggatggcttctttttgggtagcatgataggtggagatagcgttttcgagctcaggtcagtcggtccgacgggatgcttctcgggaattgcgaatcgaggctgataccgcgcatcggcgatgtggttatgatatacaggacggcattgcagttagccgagatgaaccatagtgggggtgtcagcccaaggatctccccgatggccggtaagcatttttccccccacgtgtcaaccgaccctccctaccgcccttgttcccggtctgatcgagcgcacatctttcccagatccaagggacgcgtcgaacttgcttcaacgagccgggttcacgctcctcaccgtcgacgtcgaggatatcaccatctcctaccctagcatgtgggaattgatcgaggatctgagggatatgggagagagcggggccgtcctcgggagacgaccgttcatcaaacgagacatcttgatcgccgccgagtcgatctacaagggtgagcgggggacgagattggtcgatcgatccatcgaatcgatcgtcgttcgacttgaaggtggtggcggatatcaatactgatcgatttggggatctttacgcgggccgtatagagttgcatggacgtgaagacgggacggtaccggcgacgttccaggtcatctatttggtcagtcatcgtaccgaacaagatagcctagggggtaggttccccgccgctgacatgttggatcgtgccggtcggtgcaacagatcggatggaagcctagtgataagacgcccaaggcgctccctcgtgggtcgggaaagaccaatttgaaggacgtcttgtaacgtttcggtcgaccgtgggggttgatgattgacaataacacattttgttaccggtgtttgcggttgtgccgagagacagagtacattattgtgcgttgttcgccatcgtctagcgggtggtcgcggtggtgctagcctcgccgtgatcatgtgagaaacctcacatctcgatgatgaaaccccggtcattagagatgtccgaatcttgacgagctccattgcgatcatggttacccgagcgttccgaggtcgaacggggaaagttatgcgtttccaacttttctatgaagcgcgctgcgtgacgtcattcttcagcgaaagagtttggttgcgttgggggaaaagttgaaagcagcaaccatcgtcacatcgtcgtcatggcacttggatcgtgtatggtcgtagacgtcgtcgtcgtcccgtagcagagctagcattcgaatctactcgacgattctagtcgggatcgttgtaaacccagaacaattgaaccttcatcgaagttagcaccattttgtgtttcccccaaaccatcccccactctgccacctcctcctcctttgtggtcgacgtcgccgcgcgcaggctaggtcgacagaaaacaaacacaaacacatcagcacctcagcagcaagtgtcatagccatcgtccggtcaacagcatctcactccgaatcgctcaagtaggccagccattatttacatctcaacctgattcctggaacggcgacggagactgcgcaactggaatctcaatcggtctggtggatcagatcgttcgctcgttctcaaactattctccgcggggggtccacgtggttgactctgggaacgctggttgttatacgacggacggctttttgaatctttctttgatccccacgggttctacgattcggacgttatcgacgacgacgtcgacaactaccacctcggcattggtgcaagtagcagtgaacagcgatctcgtcaacattcggtagccagcgatcgcatcgcccacaaccaacctcgagctccacgtatacccgactcggacttccgacctgacctgatcatcaaccgccaccaccctcaaatcgatcaacccgagactctccccccaggatgacgactctcactccgttcagactgttccagatctgcaaatacgctctgaaccaatacacctccaactcgccgctcctcaaccgtacccgtcggaaagccgagtcgatcaaggacaaggtccaggcgatcaggagggataggaagcggacgctggtcgggtaccatgtagaggagaggaggggttgggacgtcaagccggataaagtcctcgtcgcaggcgagtcgcagcgaggggcatcggacgtgggcaagagggaggagcgggaaggggggtcgatgagcggagcgtatcctttacggatacccagcgattccgcatcaaacaggtcgacgacgagctcggggtcgggatcgagctcgaactccaaaccgtttgatctggaaacataccggcatacaccatcttcctcatcctcgtcctcgtcctcgtcatcgtcatcacccaacctcgacccccgttcggacccgtccaccgatccaacgaggtacccgaacgagatcgcccgcctgatggcccatccggccttattcaccccgtccttcaaggccccgacgaacgtcatcgtcctctgccacggtctctacgggttcagcacggccaccccgatcccactcttcccttccctcaaattacactactggcattcggtcctccaatacctcagggaacagctagggtgcaaggtcatggtcgtcggtgtcaaggggacggggagcatcgaagagcgcgcaggggagatggataggtggttgaaggaaaagttgcccaaggggaccggcgtcaatttcgtagcgcatagtatggtgagtttcaaccccgcttgcccaaccctagccaagcggtgttcatggacgacgactgatcgacgggtttacacagggtggactggattgtcggtacctgatcacgcatctgaaaccggagacgtacaaacccttgtcattgaccatgatcgggacgccaaaccgagggagcccctttatggactggtgtgccgtgagtatcgactgttcgggacaagactcgaacgtaaacgcacacacgctcacccgcttccatgtcttgttgcaggccaacatcgggatcggtgtgccatccatgaccaaggctgcgatcaaggcggccgcttcgggtagcctccccccgtattccctcaaatcaccgctcttgtcccgagggacgggcgagagcaagagtccagcgcagcgacaacaagaggctagggacgacgctgccgcagcggccaaggagagttcttccctcttggcgttcccttccatgtttggatcttccatcacaaactacctcttgggcatctttgactcgcccgcttatggaaatttgacgacgcactttttgaacgagacgtttaacccttccacaccggacgatcctagcgtcaaatacttgtccgtcgcagggaggacgaacaagatgtcggtacttcatccgctctggttccccaaactcatcctggacgcagcggccgagagggggtatgccgaggaaaagggaaagagtgggaaagagtatgaagggaatgacggactggtcagcgtgtccagcgccaagtggggggaatggctgggcaccgtcgacaatactcatcattgggacttgcggggcgagggcgggttgttgccaaacggaccgagtctcgaggataaacctgaaggtcgcccggaccccgatgcaccggatggatgggactggaattacaagagcgattcaatggtcgtcaagaagatcaaggacaaggcatcgtccagctcggagcaaaaggaggaaaaggcaggcgaggcttggttgaataagcaggccattgaaaagctgcccgagatggtgaaaaaggcgaccggggtcagcggaggttgggacatgcagcaagtcggtcaggtcatcgactgggtcggcgatctgatgcccgggactgggtcgagcgaatcggacaaggcagacaagaaggacgcgatcggatcgagacagctcgccgatgccgccagggaaaaggaaagggagggtcgtcgacaatcacgagaaggcgaaagcggaagggatcgattggtcagaaacgtggccaacgaagccaacatgaggcagacgggggatttgggcaagcgagatgaaaagatgtcggagcgtcgggcgggcaagtttgatctgggacgattctacggcggtgtcgcgttgaagctgcacgaggagggttactgaggaggttcatcaattcgatacattgcatatagatacagaaacagatacagacaggcgagatcattgtacagccctggaatgtaatgcgatactgaaacaaatccgagattggcaaccctgggtcgatggggcggtggccgatccaccctgtcaaagaggccccgacaacgctccaaaatctgaccgaggcgtcgagcgagtcggatcaaagttgatcatcaagagcttggagcttgaactcgatgatcccgctgtcgctgctgttctccacccgtttaccattgggcgctggcatcatcatctgcaagctgagaaatccttcatcgtcgatccgcaacgagactttgatggccgactggagcgctcgattcgcttgcgaaaacagcccaaagttgtatctgcgcgtggggtagaattgtcagcaggaccaaagcccaggcgtgcagtatggtcgacttgcgagtaactaagcctctcggagcagatgaagacgtccatcacgtccctgtcattagggtaatcgagctgtatagacagtagcgagacgggaccgatcagcctcaaggtccacctgcggcgttccatggttgtgcgtgactcgcctcggtcattccgaaatcgcccttggcttgcaatctgaatatccccgcacgttccctcgctttccttccttcgccatcccgccctttgggaccctcctgatcgcgccgttcttccctcagacgttgttcttctggtaacggcggaccggcgataatggtgatcttgtcgcacgaggcgtctagatcgcctatcgcttccttcagccatgtggcctggaaggatgggtcggatcaggaatcagtggtctttgctaggatctcggcgtggcccagaccgtaccttcatgatcacgtggaacagcctgtcgagcaccgatggcagataagctcaatgtcgcccgcctggtcacacaggacacaaactcacatttgctcctgattgaattgttcatcgttcgattcctttggctctagcagagtcagctcgcacgtcgtcatgggcgtgttcggctcgtcgtcccgtctacccgagatcaatctgtgtgatgagtcgtgcagcgcttgcctcgggacagacgccttgcacttacaaggccaactggagcggccatcctggacccgcccatttcatcaacatcgacgtgcatccgttcgcattcccactcccgatcatccccgtcgtgttccccgcccggctcgtatcaccgtcttcccccgcagctccgaaacgtttcttacccgctcctcgtccgctcgaaccgaaatcatccatcccggtagacccgccgccgggcacgttggcatgtccgtagatgttcaggcattcggtcaggttggcgaggttgacctcgaaagcgaacgacgctgggtcatcatcgtcaaagtcttcttcagaggagaaaccatcctcgccctcctcgtcgtcatcgtcgtcgtagccgggtagacgatcctgggcggtccctctcctcgaaggagtttgcgggccgtcgttgaacggatcgctaggtccagctggacgccttcttcgtcgtctacgcacaaccttgctagggataaaggagaatttgtcgaacagcgctttcgacacgtatgcgacggctgtgtcgggtcgaatggcagcgtccccggggggggcatgtcgacagggatgatcagtatgaaaccggcggtaatccatcgaacttgaaggtgtccactgaccgaccatcgctcgagtgttctctacttggaaagctaatccagctgtggatagggtgactacagccctctatactccgggactcgagatcaatcaggttggggtttcgagcagaaaaggagggatgactcacctgctggaatgcgatacccttgagcaacctcgctagtggccggacgtcatacgactcgatgtcgagcacctacgcagatcggaacgtttgggtgagccgacatggtaaaaggcaaggatggatatatagtcgtcactcacaacggcccggggctgaaccatcttgactagcctgacctgatgtttccttttccttttctggaacagactcagcatcgatcagctcaacacgtttaaccgattacgatatgggaaggaccgtacgttagcgtcttagttgcacgactactgaagttgcgaatcctccctttaatggctgagcatgtaccgttcggtcgtgtccatcccgtcccggatggtcttgttgcgagacggtctctccttattccagtgctgatccgtgatcaccccgctcgtgtccgattctcgacccgtgactggacgatgattccctataagatcgcttgtatggttcccggtcagtaccgcttgtcgatgatgattgtcactcttgtattgttatgactctggttgcaggttgcttgttgaggaggtgcaagaacattactctgagcgtacatgcagttggatgctcgatcgacatttacccttcgcatcatttgcttccggaaatttggttccgagccgtgtctcgtttgattacgtaatatcgtttcacaagccagacctcgacacactctctctgggatgcggtaaaagactatgaccgaccatctcattaggaacgatcacatacatcctcaatagatggccttgaaagcatctcatcacgagtataagcatagtattaaccaagattcgaacctcccaaggatgtctctgtccttgtttggaacgcccaggaaatcgggcggtcgatctcgtacaccctcacagactccgatgcgaggtatccgattccccagccatacacctcctcccatccaccacgacgaccttgaacccttggtgaccttccacgcggtacatgtgcatcttcccagtgcgaccacctcgagccgtcatgggtcgtccgaggttccgcattatgggtttccttacgaccagctcgacgtcgaggacgatttcggggacgaaggagttcaagacgggacccggcgataccacccagaacacgccacatccgtctcgtatctaccaacatcttccaccctggcccggatcgtagagaacggcaagacgctcgaactccgatacatcgcgcctacatcgagcaagagacaaaagtcgaaccattgcaacatcctacgcgtggatttcacctcgaccatgcacgacgtttccgtatcgacctgtttctaccgtacgaccgagggggaaggcaggatcaccctcgtactcatcgacaagagatccaggatctatcggctctccttcccggaccccaaggaacgcgtcgaaaggggtttgacggcgttcgaatggaacgtacagaaattacacgtcggctggttgatgatgagcgaaccggatatggtcgctagcgggatgacgttgaatggggaagaaccgctggtatggcacgtcgtggacgaggataatctgatcatcgcggctcgggacggattgatgaggtgtaccttggtcaacgatggtgagctcgcttctcgaggccagagtttgcttaatcaccgtgcttggtaatgtaattgaccatcgatgctgctctcttttctctctctgttcttgcgccgacatgtcgcagattggacgcacgaatacttcaaacgaccttcttctttcaggatgttccgatcggacccggcttcccagacgaggatcatctcgtttcgtcacgactctaccaccgagctggtctacgccgtcacgcgcgacaagaagctcaggatatggaacgctcagacattgaaccacgagtctgtgatcgacctcgcccagacgagcgggtccaatgagcctcgtcgaccggaagacgccgtactggacctgacgtcgaacgggaatatggcttcgtcccccttggtccaaatattgccggggacagaggatacgccgtacgacaagtacgtcgtcgtatttacgcccacacctcgttctcccgagggagcaggttatttccaggtgtttggcgctctaggaatcaaaaaagatctcacgcacgtcgggttcttgacctgttcctctcagaccgtcggtatggatttccgaggattccacgtcgagcacgtaaagcttgccgtacctagggacgaggatggggacgaatctgtggcccgaggttcgaacgtttggagactctgggtggcttgggatttgaagggcaagcctttctttgaatggagcgatcttgccgcgcttttcgagcccagggaagaggaaatgggcgtcatggcgagcagcacgtggaaggccgtctccagctccaaggaatccctcgatctggagcccatgtttgacgccgcctatttcgacgcgcttaacgagggcatcgaggatggatctttgggtctagacgatatcgcccggtactttgtggaccatcttttctaccccggacgattctcgcgggcagtcttgcgaggcgcattacgggagtacgtggctgggagcggagaggcgccaatggaggaggagagcgaagtgttcaagacgctcagagatcagatcggggagacggtcgggagacaattggtgcccctgctcgacgaggacttggactatcacgaacagacggacagtcgcaggcggttcaagctcgaatggcaggccttctggatcatggttcagcagcatgacatccagggcaggtggcccatctcggtggtcccgatgaattcaggcgaatcgcagaatggggatgccgcaatggtgctctgtcgggagggtttcatcgtccccgccatcgaggatagcattgccctgatccgacgactcttggtcgatcgcgtcgatctcgatctcgaagagcttcaagagccggtcgacatcatggaaaccaagcgagtcaaagacttgctacaggcgccgaccggcacgctccagagataccatccattcctcgctgatcaggattcgcgctcgtttgccatcattggaatggcttcggcgagcatgctggcccagagcctgcatccggaagaattcttcgagttccagaaacacgcatatagtcaaacccgggtgaggcggctggctttcaactggagccctgctagcggcgactatgctggttcaggatcgatgaatggtctcgacgtcgaggttcctcaaccgctgaggaatgcatcggatcctcgcaaagtgttccatgcgacgctggatctactcgtcgagcttccgcgcgagcagacggccggcgattcctgtgacacttttaccggcctgagcctgagagtctctaacatccatcagatcgtcgcggcacgtcaactggttgccagcgaggtcttgcttctggcttgccacatgctttcgggaaccagcaactacaggataccggagcacaagaatgtctactatagcatcgctcacagggcgctcgccgtgttccatgcctgggagacattgaggcgcctttccgaaaagcactcggacgagggacaacatgcgttccatgtgtcatctgaaacgtcaacgacgatcaaccgtgctgcttttgcggcccttcgtgaagagtggaaacgaggcggcgatgtcggatccagcgacgagaccgcttattcgctactgcattccgtgctccaggaaaagcctcaaacccacagcgcaagggaattcacgcccgagtcattaggattggctgcattccgcaacttgctacagctgggattagtcacagataaggaagacatggaagctggtgccgccgagtcgatcttcgcccttgacatcttgttaagcggcaacaccgagaattgtctggagtttgtggaatccctccctcaaagcgccggtatttcctatgtcgcgtcacgtgccctgatcgtcgcaggtgtcgatagcgattccggggttgacgggctgagtcaggtagcagcggtgcttggtgcgtcgagactcgtgaatcaacatccgtgtccccagtcgctaatgccagacgttccgatagctcgtccggaatgggtcgaactggacaagactggactcgttagcgttctgcctgatcgcgtgcggtggaacggcttggccgaatattacaaacatgctcacgccgtttgcaagaccgctcagcttgccgctccggctatcatgtttgccaagcgatccatcgcggagaccgaggatccccatgcagctcagagcatgatgcgatacgtcttccaagagtacctttcgagtcagcagtacgaagaagcatggcaggcgatgctggccaaccccattgttgatcagtgagtgccgtctcgcatcgcattgaagagcgcgaccgctgattttgggcatctccagtgattctactgaagatgataggcctctaggtgccatcatccactcgatgtgcaagaccggtcaagctcagcgactcttttctctgcccatcagcgggatggagggctacatcgaggacgagctcgatcttcgcgctcgcaccgcggacccactcgcctcgccgttctaccacaaaattctatactcatggttgatcatgcgacaggattatcgcaaaggtgagttcgccttccagagtcttgcgtcacacttggtcgctaagcagccacgatattgcagctgcgctcaccatgtaccaatacgcggaacgggtcagaaatctcaccgccagaagcccggctgattatcgatcgcatcttttgttgcgatcgcggagtctcctgaccgcgtccaacagtctatctctggtggataccaagaacgcctggtttacaaccatcgccagtagcaagcctggcactgacgaacgcgtaagtgatcggcttcctagagggccgcaacatggactgattcgcctatcttttacttggtgcagtcccacaagcgcgcgcgggtcgcttgcaatgtcccggcgtctgcgtatacgcagggcatccgtcgcgagatggatatcgtcacgcttgaccaagtcaagaaagagtctgatctggtcctcgctgcattgatgatcagtagtcatacaggcagcgatttggatccgggtaagttgaacacgctcgatgacctgtgagggaccactgacaccgcttccgtatcatagctttgcccttgactgccaacgattgtatcgccatgctgtccgaatccgggctgttcgatcaggctttcgctactgccagcgttcaggaggtcgacaagacggtcgtgtttgagttccttactgcgcgatgtctggagatgaacgggatgacggatgaagcagttcggtgagtcttcatttgcgacaatcgaatcaaggggtctgacggcggttcgcccgtctgtcagggaggtgggcttgtcaacatggctcgacgcgtcgtctatcactgccacgtggcatggatcgttgtctgaaaaggcgtggaagtacctagattcgatgttgtcgcggcacgacgtgatcagcgggccatccgagcacgtctggggacggaaaatctcggcaggcaccaactttacgtatcacctggcggtcttgaacaagatcctcgagctagatcccgagtacgccgttccgcagtggcttacgggccgactcgttgaaaggtgccccgacgccttgatccggtcagctttgaaaatcggggcaacggagaaagcggcggtctgggctcgagattgcttgaaatgggtaggtaatatgggtcgcactgcattagcaattatacttgctgacaatcgacacctgctcttacaggcacaaaaacaaaaacctcgcacggtcggagctggtatcatcgctccccaatactcgccattcaatactgtggaccaggtcattgcagcagccaaaggtagcgaagacaaggcggtcaaggttgccgtcgatgcactgcaggcagaagcctcgcgacgcttcaaggggatcaagagcttgatgagcacgctcggcggagtatgattcgacacactaggcttgagggatttacgaccaataacgaaatggacgaaatgtgtacgaatgccgctgatgtaaatgagcactgatgtcggaagcaagacctcgactagactatgcgcagctactgccgaaattctctgactacagagttaattgcctgcatgccttacttccgctggctgttcagaccagaaacctcttggacaggattagagagctcttggttgagatctcggatccaggccaagcggtcagagattttgccatcgacctcttctacccggccggcgagacggcggcgattgggagagaggtgcccttggtcaaggtgtccgtggtcgtgacagtcggggtaatgaccttgacccggagggagagcaggtcggccctggggcttgtggcgacctgagagctcgaagcactcaattttgtcgcacacgagaaagatcgtggcacatggcacatgagcaaacgcgtctgggtagactaaaaggccgcgccagcgtaagaacggaaagcaggcacaacagtttcatcagcatcagcagcggcagaacgccttgaccgcgtaccaaacaagatgtatccgttcttgttcagtgaaaatgaaacgcaagtgcgcaaatgtggcaatgagagacacaggctattaagtgtgattgcttgaaagtatgcttatatgccgcacgagaagctgtaaacaacgacatgaaacacagcgcatattcaggatagcaacgatgaagctctcgatggcgcggctttgcacttttcggtagataggaccgacaaagtctgatgttactgttgggcaccctcatgccccaccaggcccatggagttcgagctcgccatcgcggcccctgacttttcggctggccactgcggggcaagacccggctgatcctgtccaagaccgatccccgacggtttgatgcggcgaaaaggggaaaaccccaggatcctcattttggtcggctgtcttgtaaccgtatcgggatcgaatgcctccaagcatatgcgtgaattactctgataataaaatcatgtcccacccaccccttccctctaaccagtctattccttccttccaacgcgccgtgcgccaagccgaccgaaccgggaaaagttaaaaaagatacaacccgaacccggtgctcaagcggtcacggcgacctctttgacggcgtcgacgacggcggggttcgacttgttgatcatcaagctccctcgaccgcccttgttaccagccttggaacccgctcggcattcgtcgacaaagtcggtaaacatctgtgtgcgtgcccggttcgtagcggttccagcagcggtgatgatgatcgcgatacgttgattagcgggacggattccgagcacgagcggcgaaagagggggtactgacctcgatagtgtccaaaggacctccggcggattcggggtggaactgtacaccccagatacgtttacccgattcaggcgtcgagatgattccctcgaccgacgagtctggatcgagagaatggcgagagcggtcagcacgtcgtcccctttatatttcatggaagacgcccatcatggaaagagaaaaagacgacgtcgactcaccgttacagttgataaagaagggagcccatcctttggggaagttttcggtcaacttgagcgcgtattgatggttttgcgactgaagatgaaaccaaacgagaaagcggggcgaacgtcgtgcgtctcgtcagctttccccatccggccatcacgtcccctcttgccggactcttgaactcaccgtgacgtaaacccgaccggccttgatgctccccgaattggcgagggcgagtacgggctgattatgtcctcggttcccaaacgtcatcctgtacgcctccaacccggcggcgagtcccaagatctggtgtcccatgcagatcccaaagatgggcttgtcccactcgtcgatcgtctgcctgaccctcatggccgtatccatgatggatttagggtccccaggtccgttggagaggaagagcccgtcgtattgatcccggacggcgttgaaatcgaaatcccaggggaggacggtgacccgtgcgtttcgacggacgagggaacggacaatgttggcctttgctccgaaatcgagcagggcgatgttgacgtctccctcggggttgagcgtgtagacctctttcgtcgacgcctgagcgatgaggttctcgagggaaggatcccagtactcttgatcggtcggtcggggttgagcgacgtcctcggcgccgacggccagtcgaccgagcgtggtcccctgatcacggagcaacgtggtgatcgcccgggtgtcgacgcccgagatcccggggacgccgtgacgggcacaccattcgtgcaggccctcgatggcggcgtggtgagagtacttggtggccacgtcagagacgacgacaccggcgcattggatacccgtgctctcgaggatggggattccgggttcgttggaacgcgccaggttcttggggacaccgtagttgccgatcatgggcgaggtgaagacgaggatttgaccgaggtaagatgggtccgtcatcgattcagtgtctagcccgtggagagggggggggtcaatgtgatcattcccgtcagcgaattgttatcgtcgagttgggcggacggcgagtactcacaactggtgatactggtactgaacacggtctctccgtatacgctcctcttggctccaaacgcctgaccttcgtaggtctgtcccgtcttgagatgcagcgctgccgggtcatgaggaggcaagactggggtgtagaggggcatctttttagggtcagaggccgggctggcgaggcttcggctgagaagagggacgttcgatgtcgagctggatgatgaggcaggattccgaacgagcgctcgggttgacgagaggaggggtcgtaggattcgggtcattttgggtcgttcgtgagatttagcaagtagcaacttggtgtgtgtgtgtgtgtgtgtgtgtgtgtgtgtgtgtgtgtgtgttttagctcgagtagagacgacggagcaccaggtgtctgtctaccttgtaggtgtatgtagtcgatagaggatgacctgttttgtaacttttgaatgagatatgatccgagtcaaccctcaacctggtcgttcgttatctttcattcatctcagtgtctcgcccgaagtaaagtcgcgcgcgagtcaagttttaaggaagacagggttagggggcaggcagattagcatggccccccgcgtccccagcgaattacaaattagcatgggggtggtgggggaagatgggatgaaattgcaaatatatatatatgatgatagttaggtagtaactagcagttggtcgtcgacttaaaactcgatcgtaggaacaacctcgttcctcaacccagacgtactatcacagtcaaaagtgtcaccacgacatatttcaatgatcagccagcaaatccgacacgcgcttgtaaagggaaaaagcaaaaaaaaaaaaacagaaagaaagaaaatagaacagcgacctccgactcacactctctctccacccgaatcccccctcctacccaaacccaaaccttgaccccgaccagacctcctcgtcgtcccttctccccgtccagaagctggagaaggagatccaggtgcctggtaagacgaggataccggtgacgtcccgatcgtcgtactcttcatctgcctccggcgtctcgagggcgtggtctgaccttcattgcagctgtcgtcgtcgtcgtcgtcgtcattcttcttgtcatcgtggttatcgctatcaactttgtctttgtgactatcggtcatgaaagatcccaagacgccagtccctccgaattgatttttggtcctgggcttcttcttcttcccaccactcgcactcgcactcgcactcccaccctcgtgatcaccccggcgcttgcccgaactcgaaatcgaactcaagctcgaaatcgtgttcagagcgggggtcgctcgtggtacgaccggtgtccccacaggcgtcccataaggcgtctccagctcgtcttcctccatgtccacaccgacaccaacacccatgttcatgcccacgttcgtcgtcgtcgtcgtcgggaggatcgccggacgaggggtctcgagagggagaagatcggattcaacctcgaactcgtcttcttcctcggtgtccgacgaagctgggcctggtcgatgtcgatgttgatgttgcgagcggggttcgtgtcgtggcagtcaggcgaacgtcatagtgcgggtggacgaaagtacgagaatatgtcattcgttccgagtagatggatataggtttaaaagagaaacgtcgtagtgtcagcattccggtcggatttgtcgctgacgacctttccaaccgggggcggatcatccccgtttcaggtacggcaaggctccgaatccgacgactcacgagcaggtaaaggctgagagagactcggcctgaccttcatcccgtcgctagcgttgggggaagagcctagaccctgcccgatcccacctacaggcgcggatgcagagatcaggggggatccgggtggcgagtctaaaggcggcgaggtggatgcgcgtttacgtttcttcgatcggttcgaggtcgagatggaggtcgaggccggggtcgaggtcgatggcaatgtctcgttgggatcagatcgagcgagttcagatccagcgaggagtttttggtgtagcttggacgccgatccgatacattccaggggtgccagagtcgagggggtacgtcttgaatgcgagggggttcgagtaggagtggaatcgtcggcaatctccacgtcgtcgtcgtcgtcgtcgtcgtcgtcgtcaccgtcccgagtttgacgggtcgacttgacaaccgggctggaaggagccttggagttactcggacggatagtgagaggctggatatgacccctcagaggcccgtccagccctctggcccaagcgcattctcgtctcgtctggatttcttccggggtcaaccctgatagatcctcctcgacctcctcgtccgatacctcgtccgactcctgtttcccaacgacttctgtgtgatcattcttcccgcccctccgaatccttttccgcggccctacttgcaaggaagtaggaaagagcgagaattgactcgggcggagcggtctgaacggggtttgagctcgggcgtatcggcgcgaggtgacgatgttttgagcgtgccggaagatttcaatgtcgggcgtcgtcgtcgaggctagctcggtggtggttggtgtcatcgtgctttgatgaaatatactgttatatttggtgtcggtcgagatgtatgtacatgaacaattgaacaagtgtccagtagtagtgtggtaagcttgttgtgaatgtgtgtatgtgtgtgcatgtttggctgtgtgtttgttgacgatctactctttggctgagaaactcgaggtcaacgtcaagtatcagctcagaaatcgaatcgaatcaacctagctactcatcatccgatgatggagagaggtgattagatgtcatgtcaccgtcatctcatacagttatcatcgcaccttcattcttattcaggtcgaccaggaacaaactcgactcgggggggcaagagcacgatgacagattcaaacggcggatcatatcgaccgcaacaacagccgctcacatcacaaccttcttctcaaccgtactcccacagacctccacctctaaacgactttccaaccaccccgacaggatcagccgattaccaccatcgacccatcctcgatcgacctcccgaatctacatccaactcgggaatggattcgcgcgatccggcagggtcgaacaacgccgctcatcccgacgttttggacctcttggggacgtacccgttcatacagtatacgccgagttcgagaggtaagtaaccttcccgtcgggatcgtccatcgtacgagatccgcgagtatgaaacccggaattcccatcacggaaagctgatcatcttccgccttccatcctctcgtcctcgtcgtcgtcgtcgtcttctgcgggaaaccaccgaacccgaactcgaaactctccagtggccaggcacctccaaaccctgaacctgacccaatccccgaccgaccgatcccacccgtcctcgatctaccctcagtacgccaggacgtttgagcagctcgatcggggtggacagtattcggcgagcgtgggaccgggagcgtcggggtgggaagggcctcgagggcagcttcagagccagtatcgggttcatccggacggacatgcgcaaaagcaatcacaatcgccaatgcaaatgcaaacgcaaaggcacgatccaactcgagatcaacatcgagccgacccaccactgtcccacctctcacaacctcgtcaacccgccctcccaatggcatcgtccacctcgtacccctacaccgaccgacaagtctgggagatcaacagacaagcagctctggggtacatggatcactggggtgggcatgtgggacagccgaatagaagtacggcagggcagagtcaaggtcaaggtcaaggtcaaggtcaagcggggcggcaacagctagggatggagagcaactatggcattgggaatgggagtggaaatgggaatgggcaaggtatgcgggcgggaagttggaaagcaggggtcagggagacgatcgatttgacggggagtcggaacgggaacacgaatggaaatgggtacgaaaacggcgggtgagttctcggtccggcgatatcgatatcgacctctcaacctagtgtcatcgtatcgagaagtcaatctgctggactgacgttgcgcctcgatattcccagacgacaaacgaactcaaacggtacaggcgactcgagatcgcccaacgtaccccatatcaacccattcaccgaatttcaacagagggtcgtgccgccgtatcaacagcaacaacacctccccctttcgatgtccggtacaggttccgggtcaggatcgggaccgttgccgatgagtaccggcttcggattgtcagcaggaccggaatcataccactcgacggcacctcatgctcaacctcaaaattcgacctcggggtatcaaccgtatcagccttaccctcttcaacagaatcgaccgacagcgatagcttcctcttcatcatccgggaccggcagttggtcgtccaggcagggaagtttcccggcggaacagtctggaccgtttttggacggttacctcgccgagatccaggccaagcaaaaggcggacagggagcaggaacgggctagggtattggtccaggagcagcacgccaaggaacgactggatagggaaaaggctcggccagccatgacctcgacggcgggaggtaggaactcggtatccgtctcaccccgcaaacgacgagctggcgaagacgaggccaagacggaagctcgtgcgaaaacgccaaagaacagacagtctgtcgcagccgcgggcacgagactggtcccgtttgtcgaaatcccggtcaagcggccggtcaaactcggtgggtatcgtagtctcgatgaagaatccgacgacgatgaagacgaagacgaggacgaggacgatgacgccgatggggactatggtggggattacgacatggagcggtccactcgtcgaagaaggttgagcgacagcgggatggcgatgatgacccccggagcgaacggaacccctagccgacggacgggattcaccagcgcggcaaagagtgccaagaaggatcatcacaagtcgctataccgcttcgtcgaggatattttcgaggccgaggacgctttccccgcggacctcgtcgaggaggatttgaaggcgtcacgagtgtttgatcggttgacggagcgggcccggcaggacgacaaggcgttgctgagtcggtcaacggtagaacgattgagcgtactgttcaaacagtgtacgaggacgacaagggatcggagaaaacgcgggttgaccaggaccgtagagggggaagatggggacgtcccagagaatttgaccaagtgggagacggataagctgtcgaggcttgtcgggatattgcaaagaagcatgtccgaggcggaaggggtcgcggtgtttgtcaacgacgggtacggtgcgagagccgatcgtgaaacacacgacgagctcgcaccggaaaagggcaagccagcaaagaagaagaggagatcggtcaaggtcgagccagacgagtcgaccgctaccgtggacgctgccaaggccggtgcggtcaccaaagccatggatctgctcgtcgacgccgtcctcgccgcggaatgcacgcttagcatgctgacagccgatgatttggccaagcctgtgagtgcacagcggacgtcagcttggaccgatcggacttgaacatcattcgctctcacaccagttgtattccgaagacgtcatccgagagacgctagactgcgcttccacgacggtcaacgacgtcttgttgccgttcctagatgcgttgtcgggcacatcgagtgagattttgactgaaactacgagaaagactacacgggctgatcctctccgacgcgaggtgtagacatccaatcgtccgtactcgcgcatatttcgacgcagacagacgatacagccagaacaatccgactggcgttggcaaatctcgccaaagcgacctcgagattcctacaccgtctcacgcgcctgatcgcccacgagggactttcactaccagagtctctcgtctaccgcactacccagcttgcagtccagctcgtcttcgtgatcgaccctattgtcgaaagcaaggtcggaactgccgcacgcgcgaccgctatctggaaagaggccatggatggacaggcggggaccaagaccctgaagggcgaagcgatggatgtattgaagacggtgcgttcattgtgccagaatcgcattgcataacccggagctaagcggtaggtgccgtttcagctctacatcgttcagggaagcgcggaacgagaagagatgctgcgagaggttctcggctttacggccaaagtggccgaactgaaaaggagccaggccggatacagaacgagaaagggaaagacgatacacttcgtgtcagctctcctcttggagttgatgcagaattgtgcctacggagtacgcgacatgttagagtcgtcggacgtgacggagatgatggagatggacggagacgcggcagagagcaagcccgctacgaaactggttggtgaattgtgcacgtgcgttcggatccatctgaccttcgagcgatgcagaacacgtcggcgctctcggcatacatggacgagatggaccggtcggcgcaatttattctacagtacatgttgaacaagtgaggttctattcgttcgtcattgtcgatatgttccgggctaatcaacagcaacacgctccaggctctcaagcggcaatgtggggaagcaaaagtcctcgctcgaagccaactacaaagtcttgctggagacctttttggaagatcaggtcgaggttctctacatgccagaatttcctgctgcggctatcagtctgggcatcaccgctcgaacccttgtgcgtcgacgctcaatatctttatttgaacgcacagcgaactcatttccgtgtggctcgatagatttctattctggaggaaaacaagcccactgcagaaaacgcgactatccgagggatcgcgatcgatcatttaggtgtgctcgtcagtgcgcttagagagtacgagatgaaatataccggtggagaggcgccgatggatctaagaaaggtatgttcaagatgacgtcgagcaggtcagctatcgactcatagtccctgatttgatcgtcagattgtgcaaaaaggcaagcatacaaattggacaacactgcgggatgcgaaccatactgtgctgcaaacgttgcaaaagaattcatcacaaaatgggctttataatgtcagtgcagtcgtctcctgcgccgatagcacgcttccccgctgatcacgatcgtctgcccaatagagtgccgcggatgtcatgaccgccagatggttgctggaattgcacaaggctttacgtcaggaatcaccggaagctggggtggatgggtcttctgatatggaggtggaccaagacccatcacccattatgcgcgagatacaggccgaactcattcgaacgagccgcaagacggacgatgatagcgtatttgctcacgcgtgagtatcctcctcggacacgagcgcgtagagatccatgttgacaagtcgcaatgaatcacgccggtagccaagacgacctgctagctcaagccgatcgcccatgcatatcggtcgaaatggcgcggccgctccaagcagccctcggtctgattttcaaagccatcttgacttgcatgagcgcgcccatagttgctcatcgcacaaaggcgattagagctctcggtgctgccatcgctgtggacccgacgtatctcagtcggtcagacatccggaaatccattcaagaccgaatctcggacagctcgcctgccgtcagggacgctgctatcgatctagtaggcagatacgtacccgacaagccagatgtagccttggagtactatccgagtatcagcggaaggattgcagtaagaataaaagctgggagtagacgatagacatcatctcattgataaggtctctcccgtacacacaggacactggtccggcagtgcggaaaagggtgatcaagttgttccgagttatttatgatctcgtccacaagcgaagcattcgcatcgaaatctgctgcaagctggtcggcttggtagacgatgaagaagactctgtcaaggtatgccctgcgttcgaccctggtgatgaaggagcgagctagctctgacagtgaatggaccttaggatctcgctcttgtgactcttcgcagcatttggttcccacaagacacatcatcaagctcggcccaagccagacgcagcgaaacacctgcctctacgactagcagtaaagatgcaggggaaacgaccattcatccgctcgtggatgtagtagctcgctacagcaacgacatgatcccggtcgagctcgccatccgagaggtaaatcttgcgctcgagcgcggtgactatctcgaaattaacattttgataccttatactgcagataagcaaagccgacatgaaaaacctgggtcaagaatacagtcgtctgatcggagcgatgcttgatcgcttgatgtcgtacgaagatcggaccgcagctgtgagcttgcgtggggccctgaaaagaatgatcgtatctggtatttacagtgatgcattgtaggaaacgctaccgctagtccggtcgatccaccttctcagcagcgccaggccggaatcgatggatctacagagggctacttctcttctcccttacctgcgacaagctacaacggtaagcacgctgtcgtccgcccggttcaccgcacgaatacatgaccgatcactgctcgaatttcagccggacgaggttgtgctttgcgagacattgatgaggatctttcgcctatccattccttcccttcccaaaacggcttcgaattttgctatcgagctgtccaaaaccttgctcccgatgatcgccaaacctgcgggcaaactcggtgtgagcgattggcagtcagatcccggttgtttcgccgaagtgctcacggtgaaattctcgctcacacagacgctagaagaagctgtcatgtgctactcggctactgttatgcatttatcgcaagaatatggcaggatcatcacgattctcaggtcttgcctcgccaagttgcggggtgagacgtctaaagcattgaaaaggccagaaagaaagccgctcgaccagaagacactgccattcatcgcttcgatagccacgttgctggtctctcagagcagtctagataccgtcaggctggagcgatcgggtgagcctcgagacagtcttgcatcgcccgggccgacagctgaagggcgcttttgctttcccagaggttgatgactttatatgggaactgacggaggtgagtcgcacttcgcggttctctcgctgagcgtgacgactcatacacgtgacctcttcatagggaccgatctcgactttcatgtttgagacgctgctggggttatgggacctcgatctcgaccaggtcatgcggcacgccatcatccagtgtttcggtgagaggttgcattcggtggcaatgcgcataccctttcctgatgtaaacgtccccaccacgtaggacacctctatcgcgcctaccccactctgatgacagacaagcgctctatcactgtcatggatagcgttttgacaggcggttcgacgaatcagcagacaaccttgaagatgttgaccctgatttacgagacattggccactcttgtggacaaccatcctaatgaccttgaacaagacagacctggagacaaacctcgtacgtatccatatgacatctatttgctttgctgcttgtcctaatagggccctgcactgttgacagggcgtgttgatatggaccagctcatcggcgatacggccgggtttgctgaatctgggttggttcaagcacactaatcggaatcacagtaccaatctgaccatgctttatctcttatcagagtcggatccgctatcatccagcgctacatcgacaaggttctccacgccgcactctccaggtacgacgatatacagaaagttgccatcgacattctttcccttacaataaatcagggtctggcccatcccatacaagtgagctttctcactcagtccacgcaagacggaacaaaggctgaccggcatgaaaaaaccctaccagtcgttccctattatcgttaccctggagacaagcgagtatattcacgtctcggaaaaggctttcgcgctccacactcatcttcaagcgaaacatgcctcgatcatcaactcgagatatttcgaaagcgcgaaagtggtgttcgatcacagaagaaccattgacgagaatgtcctcggtgggtccttccggtagtattgatgatctggacagcttagtctgacatcactggatctggtctcccaggttatcgcaatccagacgcgccgactgcgctgatggaccgatggtacagtctgatcagagacaaacgagcggtccgacaggatttcctcaaggccatgtgtaaagccttctcctttgacgctagcccacgcgacgtgacctgggtacgcaagcgactttgtgaatgtcgttagacccaaatttcgaggctcatttcgtcccatcccttcaccgcaggacgacgtcctcctcgcgcggtttatggcagagaatttttcgctcctggatttcaaggtccaggaagaggtcttgcaaatcatcgctgcgatgacggctctgctggccgggctagggatgcaggtggtggagattgtgaactcggtcaaaatcgctggacaacaagatgatctcttgggacaagccaagctagtacgagatgccgagaatgacgacgatatggaccaggacgatagtcaggttcgcagcatctcctccgggtcgtttgcgaatctgtgttgaactgacgatatgacggatgacaggcgagcaagatcgaatacgatatcgagtctttagtcaatgcgaccgccatggttggcattatcgtcctgctcaagacccgcctgaaaaagacttatagcttgaccgaagagtacgttcgccatcttctctcaaagagatcagtggcaatcgctcataattctgtcgactttatgatgaaacagcaaggtgaacaagttcatccccggcaaaaagtcggccgcctccgatcgacccgctacgaggaagatcacggacggatcgggtggtctacctgactggcacgtcttgcccggcgtcaagaagcgggtagagacggtctccgagtatcaggatcaggttattgctgtgagtctcgtgtgacctcacatgccacgcaatggaggttcttgcagctgacagggtgggggtacgatgtgtagtttatgaaacttatcgaggaggatgggacgatgcggccggaatacagtggcgatgagaacgaagaggaggattgagcagccgatcgcgcgttctaggatgacaatggaaatggaaacgacgacgaaacgctttcgacatgacgacgatatgcatgataggactgcaacaagataacgacacgggttctcagcatacgacggttggacattttgggtttggagaatcgtcgcgtgtcgcgcataatacgacgggtagtagctcggaagcatcggggattgtctgcgaggttggatgcattatccgtcgggattgtatcggcccccgctataaagagaacgaggcgagatgtgccgagatgggattgaatcgccatgtcacgcatcacggcaaggtgtcgctttgacgatatcatgagtcagatggatgcccggggggatccatggattgagcaggatgactacaccaccgccagcagcatttgtgtgtgccagccattttctcaagtttattttcatttagagtgggtgagtgcgcgcgcgcgtttgtgtttgtgtgtggcccccgcctgcctgctgcctgttgcctgcgcccctgggaaagcgtggaggggacaaacacaacaacgttccaccgactaagcgacgtggggcagtggacagcgaataatggtcgaccgcgtacatcgatccaggcctaggatcaggacctagctagctactcgttgctcgtcgacaatcagctgcatctcttggccggtcatctggattacgaactgtagtcctgtcgaatgttgcgcgattattgtcatggctttgatcctatgcataacactgctgctgctgtattgtactctgttactctgtgatcgtgcctgaatctcggtagcaagcgagcccagaaagaaaaggttcctgcttccggcgatttcgctatccacgcacctaacaccactcaccaggtagtaggtaccagctgaacactctagacgctctttctttcaagacttgagactgattaccgcaccctctctgtttgctcgatccgttcgctcagaacttcaaggctcaagaccgaacaagatctagtcctgcgttcatcacaaaggacctaggcgtgaaccaaactcataagaagcgagcaggttcgcggatcgtccgaaacgacaagatgaccgccgcgtcccgtcaacaggcggcggctgggaggatcaacccgaattggctgcactatggagcagctgcgttactaggagccatcgtggtcggtaatatactccgatggggtattctaggtcagtccatggacagttcgaggtggacagggaaaatcccagactgatacgagcgaactcgaaacgctggtcaaaccaggctggacggatccttatcgatgcgaagcattgttgagctccggctcttggtctgatccgggcacctggtcgaactggcaaccggaaggtgagtcgcggtctctgccgttggtccagccgggaagctcaaggcacgatttccttgttggcaggctgtattcattcgaccccctcgccggccctcctcacgaaatgcctactgccccagccggaaacgccgaccgggctatcttccttcttcgcgacacctcctcctactacacccaagggcaagacctcgtcgaccgtcaggttcatcggggattctaccgtgaggcaggtatactttgccgcgagtcagttgatggacccgaccttgcccggaacccctgaagctgccggtggggaaaagcacggggacaaggaggtcagggtcgtaggcaagaacggcggagaggtcgtcttcagcttttggtggcaagtatctcgtgataagtcgagtgtatgcaagttgggtcggtcgggctgatcatgtgcattctgttcagggatccgttccttaatacgaccaagacgatcaattacctcggccaaccgagctcgaacccgtctgccatgctcatcctcggttcggggctctggtacctccgtcatccttcctcggggggtctcagcgcgtggacgagcatggtggacgatacgttcaactcgatcgtctcgtcccagcccaaatcctcttcccacctcttgcccccacccatgctcaaaccgggtcagaaggggatagcggatagcatcgtattccttcccgtgaccaggccggtcgataccagactatcggcagatcgagcagagacgatcaaccacgtcgacgtcgaagccatgaactctgggttgctcgccaggttgttgaccagccatacctcgggattgaccccctcggtacacaccaccgcgccggtcgtcatcccgaccgtcttcaacgacttgctcgtcccagaggagacggacgacgggttgcactactcggcaaagatcgtaaagaagcaggccgagatcttgatgggatacaggtgtaacgacgtggcgagcaccctgagtggagcttgttgcaggcgggacccaaagttgaccgtggtgcagatcatcgtcctcttcctcgtctgcgggtgggcccctctcagtatcctcctcaggagcaaggctaccagtaagtcgggctgataaatcagcgctcatcagcaagatctatcaggctgatgcgggtccctctcgctctagcttttgcggccaagaacaatcgcctcctcgtccccgtcaaggcggccatgccgttcaccatctttggaacggccatcttttatctcttcctggccgaccggacgagcgtgtttctcaaggaacagaagcagtacaacgtttggacctttaccatcttggtgctcatcgccctcggaataggccttgtcactaccgtcaggagggataaggatatgggcttcctgaacagggaacagacagacgaatggaagggttggatgcagagtgagtattcgtgtgcgggacgtacgggaagggagtggggccggctgggctgatcctcttaatcccggtcttgacgcggtagtcgccatcttgatctaccactttttcggagcgtccaagatttcgggaatttacaactctgtgcgagtgctcgtcgcttcctacctgttcatgacgggatgtgagttcaagcctggaaccggatcgtcgttgctgctcttggtactgactcttctatggacgggcagacggtcactttacttattgtcagtccatcgatcacgacgcagagagctcctctcatggactgacgcatttctcctgcacacagattacaagaagaacgaattcggctttcagcgaatcgccatggtcatggtccgactcaacttgctctcggtcgtcttgccctatacgatgaacaccgactacgcgttctactactttgctcccttggtatcttggtggtacatgatcatctacgcgaccatgctcgtcggatccaagtacaatgacaagccggcattcctgttccccaagatcatcgtctctgccgtcttggtggccctgttcatgaagcaaggctggatcatggagaagatctttgccatcctacgactcgtgtttggcattcaatggtccgccaaggaatggtccttccgtgtgtcgctcgatctttacatagtctatggcggcatgctcagcgcatacgcttacatcaagatcaaggagctcagattccccgaaaagccttggttcgccacggcaaggaactcggccatcggcgtctcgatggtcgctttcgtatggttcttctggttccaactttcgctgcccaacaagtttgtctacaacgactaccaccccatcgtctcggccatccccatctttgcgtttatcatcctgcgaaacgccagcgggttactccgatcggcttcgagcaagatgttcatgttcatcggacaatgctcgttggaaacgttcatcttgcaattccacgggtggatggcttcggataccaagggaatcttgatggcgatcccagggacgagatggagacccctcaacttggtcgtctccacggtagtctttatctggctcagttacaaggtgtcgaatgctaccggcgagatcacggattgggctgtcggtttgccgaagaagaaacctgccggcctaccggctccggttaccgcccctcctgcacctttggcatcgaccgtcgccatcgaagccatcgagaccaacgggacggccaatactgtaccagaatccatcccgctcatgaacagggaagagccgaacaaggagtttgacgtcgacaatgagggtttactggagaaggacttgtccaccgcgacatcgcgacgatcaaatgccaaggtgtgttcggacaacgactctttacaggccggaacagatcattgactgttttttcttttttcttttcgattggcagggcatacttaaccaactctcatcacatccccaggtagcgactttcactgaagccgccaagacgagcccctcgatcaagctgagcttgaccttggtggtcctgtgggtcctcaacctattatactagattcgggcgaggcgagagatgtatttaagtgacagaacagcatggtagacaaggattatcgcattgaacttggcaatacacgaccgctaggatggtcggaagcaattttcaaagaatcagcttccggcgattctcatgatcccgcaatacccgagaacaggcgagcgcaacccgttaaatgaatcagaatcgtctctattctggcaaacagctctcatgctccagtactttgtcacacaaagagagcgaagactgagccgtgtctatcattggccatgtcgctagcaccaacaagaccggcgagcttgaccttggctcaaatcagacgcctcgagccaaagcaaacgtcggcgttgcctggcttcctcaaacgactcagctggatcgttgccttggttctcggagggggcagtcttgttgcagcagtctgctcggtgagtcgagactgtaccatgtctaccatctcttgatctcccatactgatgagtcatacagagattgttgttgcccttgttgtggtcgacatactcggcccgtcaggcgatcacggaccaacagctggtcggcttcaagcagatcgtcgcaggacttcgggcgatacgtggacgcaagtttttccgggcaacgcctcggtcggaggtatcgcccaaaaaggagagcgggccaggggatagcggatcagaccgtgataccgtcagggaatcgagacttgcggattctcttctgatagaggacatgtccgacggtggtcgagcagatctggataccaagatggcttcggaacgggaacccctactggaggtcgagaagaacacgttcttacactttcgttcggatctggaagagttgccaagtctcctcgacgcgttgggcaccaacctgtcggcgacgagcacgactcgaacgtccctcctctccacgctagcctcgtacaacagccaactacatactcaggactttgtctcgaatactcgcggcggtcgatcgaggggtggagtcgggctcaactcgctggatgagaatctggccaaggaggcaggtcgatcgggtgcaaggggactcgacgggggagacacgtcggaagaatttgtcattggacgagctgcgccagaattcgaagagctgagaaaggaagtccggggactgaaaggattgttgttgagccggtgagtcgggtcgtccttcatgcgtacgatctatcgctgatcggatcgatcttctccaggcgaaactttgcgtcagtgtcgagaaactgaacgaggacgaaagggaatggtcaaagttgtacactagatgatggagaaacgattctatgtcatggcgcgtggcaacttccatgaatgctatctatgtgaaaaccctttgcaacaccacaatcacctgacgatgggtgccttgcgatcgacctggtctagcaatcccaatccgagcccattcatttgcgtcgtggcggacccgttcatggcgacccgggcggattcttccatctcgaattgtctctcttgcgctcgagcgtcgagccgtttgacctcttcccattccacccgaaggaacacccacatccatcgtcgtcccagctcgagggcttccatgatgaacaccccgctctcgatctcggagatggtatgtaggtgcgaggagagtttgagggaccacgtgaaacggagaacgaggtcgagcaggatgaagaggtagtagacgaacggatcagggaagagcatccgcgatcgcaagccaaagggtcccgtcggtgctacccccgcgaatggcgtgtgggtcccgccacccgatctcgatccagggtgaagggaagctccgtgctcatccgagctgttggggaactgtgccgtgctggacaacccaggcgagggaaaaggtgaccgtcgatgaggtccgagctcaaactcttccgctgccgaagccgagtctgtgccgatccccaacgaggcggccacggatctgacgagccgtctaaagtttcggaagacaatgttggccctcgtgtccggggtggtcctcacgctgtagctcgagacgggtgctttggtccaggtagatgtttgaagcatgctcagtccccaatcgttggagacgtcccaccagaacgagaacaacgagttgatcaatacggccaagagcctgtgcaatccggaggtccacagcggtcagcgcctgcgccgaagcacgtcgatgggacaaacggactcaccagagcctaaacgtcctgctctccccgaaccacctgctctgactttcgtgcatttgcttttcaagaacttccacgctaagccccttgagctcggcaatctctttcaagacgttcctctgagcggccgagaggaagatgacggggaaagccgaggcatacttgagcgcgttgaagaggggtcgggaagaggtctggtgtgggatgaggtattcctgaatacattgccggagacgtagacagtatggtatgctatggacgtgcaggtatgaatgatccgttctgtaagagaccaggttggagcgccccggagcggaacacttttactcaccagatcatcccgagcttgatgtaattccccaacccgctcatcctcactcgaccgagtgccaatcccccaccccagatctggttccccgagacgacgaaatcgcccaacaccttggcaaacgaggtgagcacgtcggcgaggatgacgtcggcgaaaaagggagcgtggtcccaaggcggagagaggatgcgtttgagcgacctgtacagcgtttgcacgtgaaggttagcacgacgtttcaatggaaagacagcccgccgttaactcgccttaataatcccatcctctcggaccgggcgagaaatcctcgtctccatgtcaaaccgacgacgagaccgagcacgatgatcccgatgatccacctcgacccgtccatctcctcgggacctccctgacccgccgcgtacctgaaagccgaccagcccagcccgacccaaagggtgtagatggagaacaaggtgtacaccggaggatggaggttggtacgtctacgggacagtcgacgaggggtccggaatgcggcgtgggggggatgggagagggaagtcggggtaccgggtgagggagaatctagtcggatgatccggctcgtaggggggtgtgcgtggtggtccatcatattcccactcccatcgaacaagacttgagcgcgtttctctccatcttcgtcgtcgtcatctccatcgtttgttgtcgtactgttactgtcgaccccggccgactcgtcttcggtcaggtcgagcgcactcgctgcgtcgacgccgagcgaggtgaggacgtgcaggttgatggcccataagaggatctcgagaccgacgagcgtgaggactctgaaggggagagggaaggaggctgaaaagtgggggaggttgatatgatagtgtccggcatgttgagcgtccgagagagggaggtcgtcgtacgagttggagggtggggagtcgatgtccatcttgaagggcacgccggtgtcgggtgaggagaggacgtcttgttttgggtggtagctatgttcgatacatgcggaggtgcatgcagtctagtttgatgtccacggccgagagtcagaatgggtgtgtccggcgatgctgttctttgtaatgtagcaggtgagacgggttgttgtgagttgcgacgttggtcggtgatagtgaacgctcggtcgtctagtcgtttccggtcgtctagtttcgactggctcgccgacgattccgggacgaaatgggtatggttccagagagactagtctctagtatgaccagactaccttgtttgacgagatgaatggatgatattgaatggaatggagatggtagtcatgtgtgtaacatatcatacctgtcgacatcttcccatttccttccgaagcccaaacatcacgcgaacacggacaagctaagattgagcgtcgaagttgggggttactcgtctggttgggaaacgaccaacgacgacggcaacgaccactgcaaccatctcgacagtagaaccacctcgtacatgttccacagatacaagtacaaacattcccagcgtctcacttgacaatcaaccatgttacatcgaaccatcgatcccgctcagtggtattccggttccgttcaagtcgtccgtccccgtgtgacgatcaacctttctcgttcctccgtggcatgggccgggggctaataaggtaatcctccgtatgcgtaaggattcactgtgagaacgttccgacgtcgtagcgcagcatgggcatgggcacgggcacgaggcaaagaggcaaacagcaaaaaaaaaacaagacgataataaagaaacgcaagtcggatcagctcgtacccgtgtcgcatgtgtagagaaaagggggaaacacttgctacccatgccgaggcccatgctcatcccgtatggcatacccattcccatcatcccgtaaggcatcatcgagcccatcatccccatccccatattcatataatcgttcatcaacctagaaaagggcggccgaacgtccaagaacaaggtggccaggtgaagagcaagtccgggacgagcggtgtaagcagaagcggaggtgcgggacgagagggttttggggggggggggggggtttggatcgggtcagaggtgatcacccggacgatgagccccggccgctcgacgtatgaccggttgatagcgagaaacacctacttgtccttcctactaggtcccatattgttcctatcgggcaaaggttccccctcgctctcatcctcgtcgctcccttctggcaaggcgcccgctcctggcggacccttcttcttgttcccctgtgcctttttcaacgccttcctctccgcccgggtaagctcaggttcctccctcttgttggccgcacccgaccctcctcctccgagtccatcatcggacgattcttctgacgaggaagcgtcggatgattcttcctccgagtctgaaccttggtcttcgaggcccagggtctccatctcatggtcgatcgcggtgatatcacgggaaaagtgtcgaccgcctcctcgggagaccttgaacttgctagcgtgtcgaacgcgaggaaagcgagaggagtcgggagagaggtatgagatcagctttcggggtacaggagaaggtgtgacggggtgatgttcgaccacactgaccctcgtcctcgggaagatgctgctccagaaccgcctcgtgccatgatatcggtagtttgtatgtagttatggtctgacttgggatagtgaactgggatgaggatgtgtcgctttcgacagatgctatacgattgccaagttgatatgggcagggtttgattcgagtgattgttatcgagagagagatgacgagaggacggacatcaagtagtttatgagataacaagatgtggcgtacatgtaaaattccggatgtccgctgtgagccaacggacatcacaacgtttgaatgtccgcttttcaattcattcgtcatcatcgcatcaacttgaacttgaaacgatcctttcattctcaaatgttaatggttcgatcgttctgatatacttgctccacactctcgacgtatatcatctcattcccacctggtttcacactagagatggcgatcgcgaccatgccgccagcgctctacacgccctacccgcccacgcaaaccgttttgcacgactttctcacccgacagcttcacctgctcgccgccgagagacaggcagagatcgatcagacgagcttgttggcgagtaattgttcgcccaagttgctcgaaaagaagggtctagcaattgggggtgattaaattatggtggtgaaaggtcgtttgctcgtgacaaggctgatcgcatcctggatgtcatcaggtctttcaatcgcgagcacgtcgatcggtctaggaggaaagacgtgagtcctccacgcacgtctgtatctcccggccgtgtcctgaatgaccttgcccgtaccaccctctatagcctcgtcgaactctatctcccacaagcttacaacaactcgacgatcctgcctacacacaccttccggtgagcttacccccatcgcgctttgatccagcttacgactaccccgtctgacatcccaccccctaccgtaccgaccgttagcaccggcgatccagctcgactagaacccgctccatccaatccgtcttcctcgaaaaagcccacatcgacctcgaaaccaccctcctcgtccggctcttcctcgtcttcatcgggtccgggtgtggaaggcgtcgtcgccagggtgaccaacgaaaaggtcatcctcagcctgagcgacgattcgggcaaggaaggtgaattgggggataagttgaggttgtgagtccacccccgtcggcgcccgtcgtgttcgtcaaggtcgggcgtgaacacgcaagagtggggctaggtcggctgatcgtgcggtggggtcggtttgggtgggaatacatctcaggttgaaactagcgaatagcgccaccttcgatcggtaagtcgtctggactgtcttgattgaaagtggaagccgatcgttataccttgctgcccgtgtagaatggaggctaccttgcggcacctcgctcgactcgtcctccccgccccgttcatcacgtacggacaactcccctcgacctcgtccatcgataacggaccgatgttgcaggtcctcttcgggctcaagaaacctacgttgatcccgcctgaagacatgcccaaggtggattggttcgacgagactttgaatcagagtcagaggagggcggtcgaatttgttttgggtatgcaggaagtcgggtgtatacacggtccacctggagtgagtcacagctggagctttgtaattcggcaaggtggcacgagaagctgattcccggttggacgttggtgatagaccggcaagacgttcacgctcgtcgagatcatccggcaactggtcttggtacagggaaaacgagtgctcgtctgtggagcctccaatttggcagtcggcaagtccggtcctgctagatcctcttgtcacgccgcatccgactgacgtgattctttttcgctcgacacttttgttcgacagataacctcctcgctcggctctcacccctcttccctccccatgcgctgctccgactgggtcacccggcccgtatctcacccctcctactcccccgaacacttgattatcaagcgtcccattccgaggaggccgagttggtacgtgacgtcaagggggaactcgagggtaacatgaagacgctgcaaaagggcaagggagaaaagggacgcgtgtggggcaaggaacggggcaaggtttgggaggaagtcaaggttttgaggaaagagtgggtccgggtcggtccagtcggttgtccttggtcagctagttgaacgagctattttgggggagcccacagatatcgaaccagggaagccaaggtcgtaaagaacgtggtcgctggagcgcaggtaagtctgtccacgggaaagcatttcgaggacatcctgaccccagtcgtggttgcaggtcgtcttgtcaacttgccacggcgcgggaagtcgacaaatcaataacctgcagtttgacgtctgcatcattgacgaggcgagtcccgattgccatgaggatgttaatgacggctttagctgataggaagttttcgcaggcgacacaagcagtcgaggcggtcagtctcaagcttctcgctgagcacggagcgtatcgctgactgtcccgctgcactccaaataggtctgttggatccctatcctaaagtccaagaaacttatcctcgccggtgatccattacaagcgagtctgctagtcccatcgccgaatgttggtgctctaaattgatggcctactcgcacgacagctgccgccgaccattctcagcgcaaacaacaagtcgggcgcgaccaaagtcaagctgaagccgatcccactgcctgacgaaagcccaacagccaacggcgagaaggaagtggttgtcgatctcggtccagatgatgacgaacttgaggacgtcgtcgatgccatgggcaattcaacgatcgacacgcgacggacagagcttcgatctccacggacactcgagaccacgctattcgatcgactggaaaggatttacggtcctggtatcaagcggctattagcagtccagtatcggtaagccgcaaagcaccgtacaaggcgcaacaaattggtttcgagactgatcacagcacacgacgatcgcacagcatgaacgagacaatatcggcgtttccttcggacgccttgtacgggtcggagctgatcaatcacgaatcggtcgccaagagacgattgatcgagcttcccagcatcacggatccgacgagcgaggacgcccaggatacgctcggtccaacgctcgtctttttcgacacggcaggatcggaaatgtacgaacgcctggagggagacggagaggacgcgtcgttgcaaaagggtaaagccggagacggttcgaggtataacgagaacgaggcagagatcgtctccaagtgggtccgcaaactcgtgagttgagcgtgtcaattgactgtcgctcccatgtcgtgactcacatctcgactatgtatagattgcgctgggtgtgccggaaccagagatcgccatcatcactccgtatcaggcacaggtcgcccatattgcttccatgctgagggaagaatttcctgatctcgtttgcggatcggtcgacgggatgcaagggcaggagagggaggcgagtcttagtccacgtcgctgccgttgtgcttattgtggtgctgatcgaataggctccataggcggtgattctcagtcttgtacgaagcaatcccaccagagaagtcggtttcctggccgaagcacgacggctcaatgtcgccatgacccgtgcgaagcggcaactagtgcgtcttgcgcatggattccgagctgggccgacgctaacctcgcggttgtctagtgcgtggtgggcgactcttcgaccgtcagtcaagggtccaagtatctcaaatcatggatggatcatctggaagaacatgcggatgtgaggtttgcgatggacgaagtgtaggtcgggcgaggtattcatcatactatagaacaacggcattgtacagcagcatatacaaggatcgtcgcatctacaagcgagatatgatacagcatgggatcgagttcattgtcgtaaaggtcgttgataggggaaaggaatgaagcacggccaatcaagccacaagaccgagcggcagttgacgttgtgacagggaaatgccttccaagctagtgctgagctcgttggcgtgagcgtcgtttcctccggttcgcatggctcgtccgacgatgccgatatagttgctcgaatgtgaaaagctctggctacggggaaagtcgtcgccctcatcatcctcggtctcggtctcggtcgaagtcgcgagatcgtcctcgtcttcatcctcggtctggactgcgacctcgttccagtttcggtaaaaggactcgacaaacgtccgcgcccgggggaggtcatacggatcaaagggaaagaaggaatcgaggctggtctcggacaagctctgccggccgataagcggaagaacctgcgtgacgtccgagctgccgagattctccaacgttatcgaatgggagatgtgggtcgattcgagcgcgctccggttggccgtgatgaccgagtagcagaacatgaacttggtcgtgtgcgcaatcttggcaaacatgtcgactacgatcgggtagcaagcctgcgagacgtgacagagacgtaaggatgtttgcgactaaaagcgaggttggcaaaaggcgacctaccatcagcgggttgagctgggaaaagacggccttttgaagcacgtccatatcggcctgccaaccaccttcgtccccgtccgacccgtccacatcgtccatctccatctcgtcggccatcgtctcttcgccaccgaccgattggagggctcgccatcgaaagcaaaagatcatcatgaccgcctggcaaacggtatagaacaccatcaacccgcccgaggccgctaccgccatgggatccgcccgagcttcggccaagatcccgtcgatgtaggccgtgaggtattgaacgaccgtcctgacctggtcgtcatcgatgtacttggcccgactgacgaaactcgcaatgtagctcgccgcggcgacccggttgactgcgggttgcgtcgtctcgtacaacgccctcgataccaagagcccgagaaagaggtcggtatacccggaatccagtgaacagcaccagaacacgatgaactgggctcgtcggcactgaaaggtcggcaggaccagacgatcaaagatcgagagcagggtttggaaatgagccaaccgattgtccgggttggagtagctccgatggaatggcaacgatggcggggcgaccgaagagagatgcttgcccacgcctgccgtcttgcctgcaaagatcctctcgaggtgcttgagaaacaaggtcgacagcgcgtcgactttgctcctcaatacgtgtaaacggcgataccgcttctcgtccaactctgtcggctcgtggttgctcccctctccatcgatggattcctcgtccgaggacaaatcctccaggtcgggcgtctcgtcactgtcatcgtcgtcgtcgtcggtatcgtctggcctgttgtacgattcagagacgagtcgatcgagcgggtctacaccggtaggcgtcgtcgtcgtcggaatctctcgagcggcatcgacatcgtcctcgtccagatcttccagctcgatctggatttcaacctagagtggctccggggtcagctagatttctcccgagggagagagggagggaaagggaagcgacgaaagacgaggacgtacatccaacctgattaacctgtccatgatcccttcccagacctttcccgcgacctctgggcaaccctcgacgaggcctagcatgttcctcacgtaggtctcgaggacgagctcgttttcccttttgtacggaaaatgcttgacgagggcgggtccgaggatggaaggcagggtggggatgagggagaggagatgggcgatcaaggcgaggtggcgatgatgatacgtccttcgagggagtggcggggagttgggcagcgtcttcagcgacgtctctgaatatagaacacgtctcgctgatcagccttccggggggtatcgggagatacgaagaggaggagacccgtgagactcacgccatgtcaggcctctgacggccatggtgacgatttccccgatccactcggtcttggcactacagagcaccccgaggaacccggtgtatacgcggacaaacgcatcgtcccccgcgctcgcccaggggagttcgatgatcgccttgatcaaggtcgagtgcgggccgacttgaaggagtgtaatattcgagatcagggcttggactagggagacgagtgagggtaggtccgggatgggcgtcgagggggaaggttggaaatgagcgacgaattcgaggtaggaagtatcgttgccctgtagatttcccgtatcatccggagcgtgagcagagagcactcgacaaagaccacgaggagaccgcagagatgactcgcctgaacgaccccggagagcgcatccttgacaaactctttgatcatccctcgcttgtaaacgtcatcgacgaggccacgacgttccgtgtctgacaaccggttcacatcgcccacgctcttggtccgtcggggtgggacgatcttggttgccggtgaatcatcaacctgatctctcccccgcttttgaccgatcaaggagatggatttctgcatcttgggcgtgctcggtcgattgttgtgagcagcatccggggagatccggacccgcctttctgtcgattcgatcgccatcgccggctcgtcgacgtcctttcaggtggggatattttgaggggcgacgttacagggtgaccaagatgtagacgcactaaaggtctctaagacagatgggatggggttgggttaggatgggatgggatgagatgagattgaacatggtcgtttctccaacttttgtcggtcgcctcacacgagcaaaatcggatgaaagcgtgaacgcgcggacatggaaacatttttttggaacaatggaaattggaacgatgtccgcgtttcagcttgggtctcaaggttcacaaccaggattcgcactgcaaagattaaactctctctctttctctctcttgtagatctcccatttcgattcattatcacgcccgtatacaacgttacatacattcatgacggggtgtatgtcgaatcacaagtttagcatcacgtcggatgccagtcacattttttctcgtacgcgcatcatcccaacatcggcatctcttgtctgaacggctcggtctgttcccacacggcattggctccctgaccaccatcgtcagcagcgaggaaactcaggaaatcgaacccgctcgccgcgagatccgtctctccgcccatcccgccattcccgtgcatcatgtgcgtcgcaggggaaccagcgaggatgcttcgcggagtggccataccaccatcatccccgccgcccccaactccagctccagctccacttcgggacccgccccgtaacatcggatcgtcaccattgttcgcgtaagggtaagacgggtgcggcgattcacctcgcggtggcgagacgctatccctcggcgtatgcaagaacgaattgcccacagcggtcgaatccgaagcctttggatgggggatcatcgggttcaagaacaagttgtccagcagggatatctcggtcgggagttccatcttgggcaagggtgaagggaagccttgcgattgaaacgaatgtcgcatggcagattcagctcgagcgcctgcagcgccgatgcctaatccaggcccgtctggcatcaatcgcgaggccgagtcgttgccgacgccgtttgcaccgcgcgtactcgagctcgacgattcgctaaaggcttgctcgcccgaaagtcgtcgaaggatggccgagctgagcatctcgaacgtccacctgcaggacctggccgaaggtacgctcactggtggacagggtgataggggttagcaagcgttgtattatcctttttcggtcgaaactcacctgaaagcgcctcgaggacgctcaaacaggcttggatatccatatgagcttccatcagactcggtgccgccgtcgaatcgcccaacatgttgatgttccaaagtccatagagataggtgattccagccatgaagacgtagtggctctgtttagccaagccgattcagtaaggactgcaccaatttccccgacctccccagcccacactcaccgacaaccagtaccaattgatcttgttctttcgttgcaagctcttgaagattcggatgatgtagctcgacgacgagagacacgtcgccaaggcctcttgggacgggcgggggcacgccggtgatgggcggaacaggagcaagaccgtgtctatcgacgcgagcgtgtcagcagtgatcgacccccacgacccaccacagctcgacgctcggactcactatgaaagctgacggcgtacccctcggtactctgagtacccctcggttcaggactgttctgcaaccactgtttaagccggtcgaacatgttcatgaaccactcgtgcgagggcgggtcgaaactccggaccgagtagagtcgcgaatagatggtcgattgaagttctcgaagtgggataaagttgagcgagacgaccttgtacgggtccgggtcagaatgcaggagtccgtggttcgtgatggccgaatcggggaggttcgaaaaggcctgccccgaccgaagacgccatcagattcgtcacgttcacattttgcacgatcgggaaaacactcacgggcacgctgatgaatgtatctgggatgctgggtggtcgaccgagcgcgtggcacaacaatcgatccagattgtatacggcgtagaacaaccgtctgttcatgtccaactcgagcggggtcaaactgtccgattgtgccgtctcgtgatgcaacccgtggtcgaccgcggtccgactggcgagtccgaccaggaaccagatgcctgtgagcggggaaggattggagggggttaatcagcgaggacgtacagactctggcgtatggcactcactaccgcgcgtcggattcaacaacgaataatagcaaaacaacaggatggcctgcaacccgatcaacgagtcggattcttcaaacacggcctcgaggtgcttgacggcttcgagatagaaggcctcggacgacattctcagttcggccgtcgggtcgagggatcgtgagagcgccatggtactgagggcgagcaccatgaggacgaagaaaatgtcggcctcgctcacgtcgtccgcgcggtctcgaacgcggacgagcatgtccctgaacgttggcatgtggaggatcggcagcatgatctgtacgaaatcgacatagacctgaacgagcctgtcgacggcggctgggggtggcaaggcggggatatcgacgggtcgtcgtgatttacgttgcgccccggccgagtcgtccgggatcgatgtcgattgattgttcccgttgacggcgtttccattcgagccggtctgtcgatcgagatcatcaccacgggcggaacgggccggtgagaatgcgccccgagcgttcgactcttccggtggaccccgctgatgactcgtagggtacaaccctgcggccaacgcttcgcccgcctgttgagcgttggtcgatccggcgtaattgcccagcccggacaacgagggcaacatcatcatcaagttgctatcccttcgaccttgaggcgccgggggtcccgtggcgggtccgacgcgcatgacggcgtcgacgaccatcctcgcgagtcctaccccgccgtgtgaagctcccggatcgaggttggtcggattggatcccggacccgatcctgtaccgctcgtattccccgtcgacccggatccagggtaaagatcaaacccacccgaagtccgtgtcatactgaggttaccgttcatccccacccccattcccattcccatccctgtcaaactcggatcgatatcccctgaccctccaccgggaccttccgaatctaccctatcgaccgcgtacgtcctggccgagcctgagcctccatcccagacccccgctgcacccaacgcgctcaacgctctcgccccctcggtctctgcctgactgtgtcccatcccaggtttgacctcgtcttcgtcctcgtcatgatccccctcgttcaccccgttcggagtgaagaaatggccttgaggttgagattgagcgtgtccctgtaaagtctggtgagagcctcctggggtgttaccccctgatcctccggggaggtggagcagagggagggtgttgggtcctgtgagcgggagtccgcattgagcgcgaagggcgaggacttcttgttcgaggtcatggatgtagctgcgggtcgattcggagggtgacgagcgataagatggatgatggacggttgttggcgggatagtaggggcaagagtgattgatgcaaaaggaaacgaaatcagcctcctgtgacctgaaacccccggaccagcccaccccccaagcaaaccatccaccccggcatgagggtagtgagattgcgtgtgtgtctgagagcctcgacactgacctcctagagacgttttgtttcgagatggcatcgaatcctatacattcgacccgtgccttttcgcatgccgactgcgcgcgggacaggggcggcgcgtggggttaaacgatcgaggtccgtggggtgtcatcgtcgtcgtcgtcgtcgtgtcgatgttattcggttcgagatgcatgagtagacgatgaagatgagaaagggtcgtcgagagaggcatgtgagagaaggatcagtaagcgggcaaagttggaaccacggctggcgggatcgacttacacatgccgggagttttccatcgcactatgagacccgcgtccgtcgcagaacatgtaccccgaatcaaacccaaaacgaaccagaccccgcattcgaatcagtgcacgttcgagtcaatctggagaaaactccaacccccgaggatggagttgggtaacggggaaatcgtgtaccgtaccttgctcttccgactcctacacctcgtacacgcgctgatggcccgcgcgacccgatgttcgaacgggttcgagctggacccgggggtcgccgtgcgtttctccgaggggaccttcatcgtcttgatgtttgccagggggaagaggttgagcagactacagtagagtaggtagagtgtggtggatggtggattgcgggccgatgggtgggcgggtgtgcaagagggatgggtcgacggtctactccgttatcttggctcgttcggtggaagccgtcgtcgtgatcgagtcccggcgtcgctgcgatatgattccccggctgtcgatacgattatagcgaggcggacctgatagcttggactcttgctctcaatctgagatcaaggcgtatgtcgataccagatgggcaatcgtcgagctgggtcactctctttccctaccatgtccctgtctgtctgaggtcgttggttgtcggtcgcgttcgatcttcggcttaggcctaaaccgaaaaccagctcagaaaaatgaaatcaaaggttcacaacgacgcgatgaagattaaaagcgcgcatagcagcccgccagccacgacgcgcgccggttacgatcaagcgcagccagagcggtctgaacttctcatttcgttgtattacctaatcgtatcgatcgaccggaaccgagcatcaaagccatcatcgcttacgtacgcatgcggcatctcgacatccggccgatcggagatgtgtttccgcgtgtttccgtgccgccgcgatgatctgggataccatccgcatgaaaggcgagacgaaacgcaacgagatcgcgatcaacgacgtgccctcggtcaagcaagtccatgacgtcggaaacggatttcgcaagaccgagtggtacgccctgtctaccggtgaggatggcaaccccggaatttttgccatgatcgatcccaaaccacacgctccttggactgatcgagttcctcaaggcgttcccgcatgcgcaggtctaccgcaacaagactgaagggatgatgcgcttccagaattatttcctggtcgctcccgccagccattcttgttggatcgatttgcgagtgcaagatctgtagaagatacactgatttatcaaagtctgatacgaagagattttgtgccgcacgttcgcaacatgggcaaggacgtatcgtctacgcccgctctgtcccctttgcgaaggggtttcttgtcaaggttcgacggttttgtcaacttccttcattggcccttgcgttgattgtatcgatgattttatgtttgaatggacatctgggcatcgatcgttaaaatgccttgttaagggattttgaacagatagacctaagataccaggaacgacccacaacaatgaggaaatctgttcacgtcatctctgtggcttttccttattacctattcaaatctgagccgatctgagaacagtcgatgccatattagactttcttcgcggaacaagtcagagacgacatagcgcgaaccacgtcgtgattccgacgtatcggagcgtgatagatgatcatggagtgacaggtaagctgggggaggacactatcactcgaatgtcgctcgatcgagaattgcaggaatccagacgagggcctgctccaacgagcatgaagaaatgagccgtgcggggcccgcatgccatagctctttgcgcttcagttattggtctaagatcgacaacacgtcatcaccaccacagttgcctcaacaagcccgctctgcgcagcttcggcatatcgtctccgcgtccggcaacgtacgcgctaaagtatccggggcagcgggcgaggcgtttggaaatatccgttcacttgggctctcgttaaggatatgggagctgcatcagggacacctctgacgagagttcatcgtctttggctgctggaagcacattactatactttgcaagagacgcttgtctaggctagagcataaagatgactccgattcagtctccgactcgactggtcaaaacccaaaccggtggttggcaattgactcgtcatggccagccctttttgatccttggcggggaattattcaattcgtccttgtcctctgcggcttatatgcggacccagtggccggtactaaaggatcatggtctcaatactgttctgggcgccgtgacatgggaacagatagaacccgtcgaggggtccttcgactttaccgaactggacgcatgtcttgatgattgcgcggcaaacggaatgagcttgatccttctatggtttgggtctttcaagaacggtaagcgcctgtcggctttcctcgcgaccatggctggctgatcttatgcacgcacgggtttctcattcaggcgactcgtcttacgtgccacactgggtacgtaaagataccgaacgctttccaagagcacatgtgaaggacaaaaccggatatatcaggccaaagaacgttctatccgtgttcgacgcgaacaatatggacgccgatgcgagggcgttctctgcgctaatgcagcacttggcgaaaaccgatggcgaacgaggcatagtcctgatggtacaagtggaaaatgagcctggcttgaccgggtcgtccagggactatggacccagcgcaaagggagtttaccacgaacaggtccctcgagctcttatcgatacgctactggcagaacgtgcctcgcttcaccctgaattacaaaggtccttagaaaactgtcagttctggtctaccgctacgaaaagccaggagggcacatggtccgacatttttggggattcaattcaatcggacgagatattcatggcctatcactacgctatctatctcgaacgagtcacctcgagcggcaagacggaatacagcataccaatgtacaccaacgcatggcttagtcctgtcgatatggatgagacgttgaccttgccaccgatcctcgccacggcggggggatccgtgcccggtgtctatccttcaggtggcccagtcatcggagtcctcgacatttggcaactgttcgctcaatccttggacttcatcagcccggatatctatctacaggactattccaagatttgtcgacattataaacatcgtggacaggccttgctcattccagagcaacgtcgcgacgagctgggtctacgtcgattgtgggatgcgtatgggtcgtgtggcgcgctcggagcatctccctttggcatcgacacgccccatcctttcatggccaacatgagaaatcattttgaattgctcgcgagggtagcccctcatattttgcggctacaggccgactcaagcctcggattcggtttctactttgacaacctgccacccggacaggcttggaatgcagacgctaaatcgttcgagctgggtagatggaccgtcatcatcgttagacatggattatggatccccacaacccctggatatgggctcgtgatcatgttggacgaagatcggatgttgctagtcggtgcaggttattcggccaagtttacagctcgagaccatgcaggggaatctggaatcctccgggtcgatgaagtggacgtcgaccgcaagaccggacatctcgagcccgtgcggcgattcaatggggacgagacgcttcatggtacagtggtacagatggcgtccctgtcgtcagacgaaaaggtcgactttgatatcgcccgaaccagacgatcagagatatgcagagtttcgttgtacagtctagattagatgcatctttgcaaatctacaatggatctactcgagaaaacattgccacaatacaggtcgcgcttgtcttcggccgggatgagagaagcggtgactattcgccagtcttttcttatcagacatgataggcattcgtccaaccgtctaaaatctcgaatcagagcaagcggtcctgatcccgatctacacctgcccgtttgcgcattatgctctcaggtctcgccaaaccatatttgtacatcgaccactcgttccgtctcgttgcgtccatcacgtagcggatgtatgcgtgaccttcggggaagcagtcgaggacaactgcagtgtggaagcatgctgtgctcactgtgaaatcgctatcgaacgatctttttggtatcgaggcgaagagctgctccttgcttgtctcggcgtattattttatctaatattttacagggatgaatagaattggcgtctggccaggtagattttggactcgcaggccgggcggttggaacgactgaggtaacagctggcactctggacatcgcctaagcgaagtctttctttccggaatcgttttcacgctagagaatactacatcaaatccgtgcccactctgatcaagcgcgttggtcaacatgagcctcgtatcaaaaaatcgccttcagaggtatactcgttgcttgttggtaggcgctgggctggtattgcagatcggtctacattgttccaggccgctacccgatcggcccttaggcttgcttctggaccaactccgcggcagcgatgtcgactttggtctcggtggagccaaactttcggggagaaattcctctttcgaacagttcatcgatctcggcgggggtacgccccttggtctgagacgaccatccaggatcgacaatcagctgagcgtcaaacattgtgacggggactgcacacgtgaagctcacctcgggcatgaaaaagaacataagcaccagccagacggcagtgagtcctccaaacaagtaccctggaagagccagtgaacctgtttagcaatttgtcggacgcgcttgagacgtgtctgcgctcaccgatcctggcgccccagttcgcgccagccgggtctagcatgacgggtactgtatattgctataaagatgctgtcagtaggatgaatggtcgtacagatctgcggccgttgctcactaggatcaggttgatgaacgattgaagagtgacaccaagcccgatcgccttggatcgaagggcgacggtcgagatctccccaagataagtccagcctactggaggaataccgaccgagtagaacgccatccagatgcaggtcatggcaatgatgccgttgggtccggccttgttggtgatgggtacgttcgcaagtcctccgatgaccatgacgctgatcaagcagccgacagtacacgtcagcaccaatggccgcctgccgactctctcgatcaggaagacggaagagacgattccagcaaggaggatgatgttggtgatcaaggtagcagtgaacggatcggcgatgccggcctgcaggaaaaaatagcttttgaagggaaaattgaaccccctgtcagatcgacatctcttggacttgccgagaacttgcgagatgctcacgtagagtaaccgaaggtcaaggcagcgccagccagtccctgtatactcagcccgtaagattgccactcgatcagatcccgtcaaaatgagagtcaaacgacccgaagctgacctgtagcatgagtggcaacgctccaatgcagaccctcttcaggttcttaggctggaagaccgatacccaactgtactgggtcgtctgcttgagcgcttcctgggaaagctcgacctcgtatcggatgaccgagtactcatgatccacgtcgaagccttcgacattgccgatcagacgcctgagcgatttcttggccttttcgtgtttgccctgtttgcagtagaatactgaaaacaccgcgatgtcgtattagcgatcgatgtctgtttagatacacgccgcgggggaggtgaagggcgagctacgtacctggcgtttccggaaggacgacgaggggtacgagccacattcccaagagaacaaattgcgagtagaatgccgccctgaattgagaaggatgatcctgtaaagcccgtcgaggccgtcgtgagctctcctctgcgacgtatctcataggaggatctcgactgaccctgatgaccctgagagtgatggctccgaacaggcttcccagggcgaacatgaacgcaaagggcattgtcatggctccccttattttgggaagcgagatttcggagacgtagcacaccagaccgggtcccaaataggcgttggcgataccagcgaagatcttggccgcaagaaagaccttccaatccttagcgaggatctctaacacgatggcctgagatgaaaaggcgtggatggatgagcacctcaaatctgttgatcaagcggcatatctgggaggtcgactcacgatgacaatggcaatggtcggaatgtagaggttgactttgacgccgaaacggtccgatgtgagaggagacaggacttggaataagatttgtacggcaaattgggtaccaccccaaagagagacatgggtggcagacaagattgggctaccggtccgagggtctttttcggtcgcaaagacttcgatgaacccagagttggcgatgatgttgcccggaatggagagaccataaccgatgtatctgtcattgacgtgtaagagagagggtgagcaagagatagagagagggaagcgatgagtgccattgctttgatcgcgagcgatgccgagctcttcttacacggcgccgacagcagtggcgattccggcgctgtagagcctccagaatttgcggatggtctgactcggggtcaggttgacaaaggccgagacgggaacgggttctagggtcgagtctaccggctgggcgctgaccttgttatcctcatcgtcggcgtattcaacgtgaagaccttgttggtgtttggtatcgagcttgtcgtccatgtttgtgcgagcaggatcgttggagtaaggtacagacatgtcggcgtgggaggggcgtcgtggccgaaatttatccaggcgagagtgagtccgcttcacaagccgtaccatctgttccaaagttcgggactcgacattcggattcgtacttgtactcgtcatgcattgcgtgtttccctgcagaagaagtacgtctagaacgatcaacagtggaaagggatgtcgtctacccgaatgaagggatcgaagggatcaagtcggtgccgtgtttccggctggcggggacggcggacctccttgttactgcgagactgggtctcggctgtagctgatgaatgagatagaaggcggcaagtgacgatcccggtggaaacatccgacttgatgacaatcccgatagaagaccgcagggtcgagcccccccgggggtgccttctcggtggataataacggggaatacaaatcgatcagccgccagccgggatttacggtcagaagtgatctaccaccaacccaccgggtcagaccgcagacgagcggaaacgaatccggtcttgaatcatttcggatccacctgtattccgtcgattccgttcccctattagctactggctactagctattttgccgcaccaaggtgtatagttctcgcagctcggtgccgcatcgtcgttcctatgttgtatttaggctacaagggtatcgccacgactgctcgacagcgtcatgacctgcacgatgatagtcgtgttcccctcaagagcgacgcactgccaagcacaccccacccgccttcccgctttttagcttgcctgccatgacatccagtaatctcacctaccgaaacccggttgtccccggtttcaaccctgatcccagcatgatccgggtcggttccgactacttcctcatcacctcttcgttcgagtatttccccggcattcccatctatcacagcaaggacttgatcaactggaagcttatcaatcatgcgtgtacgcgccgatcgcaactggacctccgtaccgtcgaggccggaggtggcatctttgcgcccacgattcgagaacatcgcggaaggatctatatcacttgcacccagatgcaaaaatccgactcgttgggtggttacaaggtaaatttccctaattttgagaaaggattgtttcgtcctaaacatccacaagctgacacatcctgataccgtccgcgttgaacagaaaatggttgtaccccgggggttcttcctacataccgacgatatttggcaaaaagattcgttcagcgagcccatctggctcgagaacgcaggtattgatcaagatgtacgtaccggacgtagcttcctcaatgcacatccagtatcgagctgacccgaacaactttctgtctctcccgatcgcagctcttcttcgatgacctctccggcaagctatgggtatcgacagccgatttcatcagtgaccctgccattctttcgaaaaagaccggccatcccatcgtcgtggtcacccgagaggtggacctcaagactggtcgaagtctcacccacgacgtcgtcaattgctacagtagcgtggggaacggtgtagctgaaggaccccatattttccgtcgaggagcctattattacctgaatgtggctatcggcgggaccgaaatctgtcaccaacagtggatctatcgatcgacagaggggccccttggaccttgggagacggcacctagtccagtgaatcccatggtctacaacggggagcatcccgagattcaactgaccggtcacatggacctatgtcccggagctcacggcgtcgagggtcaggaatggtgggccgtctttctcggcgtccggccgcagtacgatgacgagggcaaatcgtattcatcccaactgggacgcgagacgttcctctgtcccgtctcgtgggaggacgactggccgatcgtgaacagaggacaactggtcacgctgaacggactgaaaggtaccggactggaacgcctccccgatgcgtacgaggagactcacgaatttgtcccctctgatggtaagctcgggtcgtgcggcaggtagtgatcaagacctggcctgagatctttgcactttgttaccgctagaccttccgcttgggtggtaccatgccaggaccccgctcaagcccgactttgacctccgcctgcgtcccggtagcgtcgccttgtatggcggtccttatcgtttcaaagacgacgaatgtatcgccatgctgcttcgtaaacagcagtcgcatcaaggtgaatggttgaccagcctcgaattcgagcctcgtcgcatcaaggaggaggcgggcgtgaccgtctggtggtcaaagcactgccacgcggctcttggtatccgaggtactggacaaggtgaaggggcatccacctcgactcatgtcgtctttacctacccggatccctctcttccagaggatgacgtctttctggtgaggagaccgcctttctcaggaggaaccgtcgttcttcgaggctgactcttgacgctgagcaggagacttcacgcccgctgatcggcagcaagatcgatgtcaagatcatcgccaagcctttatcctacactttcttttaccgagcacccgaagacaatgattggatcgagatcgggtcgatccagactatcgtattgacccgaactcgcgtaagagactcgttctgtacgggcaccatgttgggaatctacgctctaggggaacccaacaggccatgtctacaacctgcattcttcgacaagatcacgtggaatggaaaacgccaaggttctcttaaaccgactgcagtttaggcggtcgtcgagcttgtatcgtttcgcagcaacccaactgaagacaaatagacggctctgtaacagtagcatccgactcatcatgatcatttcggtattacatcgttttctgtaagacaaatttgttatcttcaagctcttggacatttccatattctgcggcatataacccttcgtataggcctgatattccgctcagtacatgatggtgttgcgttcgaccatacggggaactttgcgtagcaccggatcatccttcgcgacggcccatagataaccatctgcacgagatgacacgaacgactcgtcagcccagcctggattgcagcggtttgccattcaatagtcaaggagacccaccgatatccgcctcgtcaacttcagcgagccactcgaacccttccttgaccttgagttcctgtacgcgttccaggatgatcttgcccgaatccagcgcggccgctcggacggtatatgcctcttgagctgtcacccgaggtccatcgacgtgtttcgggatggcatccagctcctccttggacttgccctgtacccgcgatctgaattccgaggacgaactcgcccactgtcggagcgtatccacggtacattcggacaagtcgacgattccgaggtggacgagcatggtgcacaagacgttgtcgataaacatcgggatgacgtgggccgagggcacagtcttttgggtcgatttgtcggtgccagcacagggtgaacgcgggtccagtcgttgatacagagcgaacaggaggaagaatgcctttttgtagatgtagaccggtcgactcgggtcgagcagtgtcaaggttgtttggtctgcgaatccgggaatggccttgacgagctgtggcgaggaaagtatgggcaagttcagcatcagaagcaagaggtgatacttgccgggtccgcgaatgctcaccctctcgacaaagtgatccgcgcccgcaccgtctccctcgcgctgagtgatcttttcggcctcgtccaagatctcgacgaccaagtctcccaagctcttgtatccctggtcgagcaatgccttgcccgtctcgttgcaagctttgaccaccaagtcgacagcctcggcaacttcgcctccctttgtacccacggtgacgccaggcaaggtctcgtgaggcttttcgctgaatagcgagactcccaagatgcccgccacgtcgtccgccgagaggtctttgagtccgcgactgctcaacttgtcgtcccccgtgatgaacagcccgaccaagatcttgatgatgttttgataggctccatcaccggtagccttgtgtagcggtaaacggtatcccgacaacgtgttcaagagcgagaggatggcaagaaagttgatctcgctcgagagggttgggaagcgtagtgggaacgccgagacgccgtgttgcgacttgagcctgtcaaagtcggattcgtcgagtgtttccgtcaagaacttgtcaatggcttcgaccgagatctgatagcggcaaggtgcgtcagagtcagtcagcgacaggcgaatgtgacgttgagccggggacataccttgattcccgagtcttgcctgacgctcctgcaactctctcggacttgagcgatgaacgaacccgacgatggaaaggtagtcatgtttggtaaatccgagggcgtctatgacaatggtggcgaggacaacgtcctgacacatgacaagaggatacaaggttgaagcacggccgctgctatttatcttcttattttagtttcatggtccgctgcccccggttgactcgatttgcttccgggccggtaccgatcggaagcatattcaaaagtccattcaagtcatacgcctcggggtctatatgctccaaaggccgtcttacatcctagtcaaagaggcaactcgcaactcatcgatacccagccccatcatctgcttgcccgaaataactgctactcctgcgcgctattcccgctttaccaccggcaataccaccgccaccaccaccgggactgggcaggacgctcggcgtgtacgccttttcggtcttgagcaccttgaccttgacctccttctccgctcgtgtcaggacacgcaaggcgaaagccgccgtcgtccagacaccgcctacagggtcgatgacgttcagtcttgttagcgaaacctcggcgtcaccaatgacacgcttgggaaggactcaccgatgacccctgctagcctgatcaagaactggtacagcgtcgtcgtcctctcttcgaccgtcatgctaagcgcttcgagatcaaacttgaaaaagataccgggtacacctcgaccgtgttcgaccactcgcgagtagtcggtcacggcgtactgatgtcatcgagggtctgtcagcatgagcagaagaaacgaggcgagggaatggctcggctcgagtggactcacctggctggtctggatcttgcgacgacccgaatcgatataagtcgtcgggaccacgctcaaaaagtattggaaaatcggaaactctagcaaaaatccgacaagtgacctcgtcagatcaccgtcatgtcgacgctcgacccgacgcgagactcactctcttccgtctgaacataggtcatatcgagcggctgggcgatggcagggaagaaaggtccaaaggaaaactcgtgaatgacatgcgagaggttcatgactgggccagcccagtccggtggtcgtcagctatcgaccaaaagagagcttcccggcgcccgtcggcgatactgacgatgatgacccgtatgctcccaactcatgtatccatgccccaaggtcgtgacatgcaaattccccgtgaccctcttgacacccacactcccgtagatcctacaggccggcccggcgtcaggcccgtcgaccggcctccaaacctcggtctttctgaatcccgcggtggaccgtctcggttcgtccttggggctaggggggcgtcgattcgaagcgttagggttggtcggcgtcgaactgggcccgctgcgcaagagccgggagaagagagcacggagtcccgagctggacgaggtctgtcgggtaggtttgggtagggtgagcggggaacgggacccgcggcgagcgtcgtgtacgacctggttggccgatgggagagtcggtgcggccggtctatcatgcgaacaaaggtcgtgatgctgagctcggcgagctcgtcctgctgatgccggctgtacagtacgtactgcacgcttaacgctcgacccgtctcccagacggtcccgtccttgacgaaatcgtccgacaagtgtagtctatccccgacgacgtcccgcaggtcgatcgagaggtctgtttggcgttcacatcagctcgagatgcgacttcgggtaaatcgacacgatgactgacagtgacacggcatggccacggtcaggtcgacgttgagttgcaattccttggtatcgatcgtcgggtccacatggaacgaatacgtcggtgcgccgaacaagaattctcccaggtcgttcttgagagtatgcagggtcgtcagcttgctcggcgtcctgccagcttacggtgcttggtcgtggactcacgaggatgagaaggaaaatgatgccaccgacgacggccgtcaaaatcccaccccttttggacctctccgtgtaagtcgactggacctgaattcatgacccccatacgctttgtctatcagcttgatctccgcatgtcattacggaacgacacgtaccttggggaacgcatcgaacgccttgatgggcgcgatcctgtcgagctcggcgaggaggtccttggcggatgggtcatcgttgaacgacttgttatcgcccgtcgagtcgttcaacccgaggtgtggctcgaacatggccagagggagagacgcggagagttaatggtggcctctaatggtcaattgcagtagaacggtaggagattctgtgtctttacatgcatttcaagagagttgaaagggagaccaaccttgattcctctgacgaggcatcctcgcggccactaaccgactgaagcccgtccgctcactttgataacaaatcgaccgagccctcacacagaggatcaattatgacacgacgacaatcggtataacaacgctccaccttgtcacgtcatgtcaattgcagcagtggaccaaggatcaagatactctctcacagacgctgcgttccagcaaccgatcgtatctcttacaaacccgacgtgttacaaggagcaaggccatgcgaagtgatcgaatccagaccgtccagcccgaaatcccggctctgttccttgactgaaagaatgcgaacaatcatttggcagggcgccatccagtcgtaggcaagattccgaggtaggagaccaccgtcgaggccgagtatcgatcgagatccaggttgtgcctgtccaagacggcgggcgtagccaggtgcgtccaaccatacgtaggtaaagagtccaagagtgacgggagagagaagagaagaaaacccgatgatatgatggtgcctgcaaaccagacccggacgaagaacaggtggtggaaatccgggaaaaaccgatgtcgggtcccgtggaagagacaagaaaggcccgtgggctcgttttggtaacaggttttcatcaggaccgactgatttcctcctgtgtcgggatcaaggtagggaacaaagttaacggatgttggacggctctgtttggttggtcccattatggaatcgggagtgaaaaccgggattcgtaattcgagaaaatgaggtagataggacgatggcgatgccgagctggcgatgagattattgttgatgaacgttcgataaagatgaagatgacgacggggatgaagatgaaagatgatcgagaatgtgacggcggtgacgaggcagttgacgatgtgttacggggagattctcccgacgatgaccatcccactccctccttttcaagctgaacgtcctgttcaggcggtaatctccggtcctgttccgccggggattaactatcggtatcgacattcagcatggtaagaagcagagtccgtactgaaagtcagccttcaagttggcagacgacgacgacgatgacctggactgaccatggcgatactggacccgttcaacagtgtctttcctaggggagtcgcgatggtcccccggtccgtcacctggctgtagaagcgtgatgcacgagcaaagagagaagctggcggtcagctgagactgtatcgaatcggcttttggcgtcgggacacggggagacttgctattccgtcacgtccttgagcaccatgtctaccgggtcgcacatcgaatgatcagcctcagcacggacaatatcgacctcgacaaagctgaagactgtactcactgacataatcgtcgaaacccatcaacgtgccgacgaattcacggtcccccttcatgatgacccagattcgcgagttgatgcatcggtcaatcagctctgcagtgaagggaacgaagcggttagtaggtaggactacgtcgaggccgcagggagcgactcgcctagaggaaggatcgtggatgccatcttgtcggttcgccgggatgtcgtttgaggatgattcgcggtgtgtatcgattcgcttagcagcagaggatatgaccagggtcggtatctgtggatgtgagaaggtgatgatcgagagggactggtcgggactcgtttcggatccgcgttggtataattccggattgcttaggtaatcaatatcgtttgaacgtgttcttcaagcgcataaatgatagagttccatttgagaggactacatcacaggaacccggtctgactgttctagtatatacggttctgtgttgacagtaatcgggcgagccatcatgcgggtggcctaaaagttctcgtgacgatcgagagagtacgagagtttggggcgatcaaggggtgtgacataaaacgtaatgctggaaaataataaagctggcggaggaggcgaaagctgaactgacacatcagtgcaagaccgaatgccacgggaacgaaaccatacttacgagaaaaatagagttactcagactcgtgccccttcaagccttgcgagccatcttgtgcgccatgcgagcctttatggcagcggcatccatctgtttcggctgggaaggaggtcgcagtcgctctcgctggattttggcagccgcctcttccgcctcatcggcgatgcgtttcaatctagagcctttgttgacgagacgggtatcgtctgcgtactacgtcgacttggtcgtccgcctgtgatccggacccaccattgatgatcgctttctcggctgggcttaggattttttttcttgcggctgatgcgggcgtcgaaatcgaaagttttgcggatgggtgaccatttgttcttggagtagcacaatgctgcgatgctgcacatccccacatcgccgagggtcgtcttgaggagctctccgccaagcatttcccgccattcatctaacgcttccgattcgggcggtaggtccaggcctcgagaaacccaactgaggcaatgagtgaagaatttcttgacgtcaggcgacaccaatacctacaagatagacaaaagtcccgtcaatgacttgtcgtccggatgtcttcgggtcagcaccgtgcggcaatgcaccacgcaccttttgatacacggacgaatcgaccatgttgtggtttaaccccagttactgtataatgcacgatcccgtggtcagcaagcgagtaggcaatggaaacggttgaccgactgacctcggtgatggtggagtcgaaaatgacaatgacagacgtttccgaaactgcgataagcgtctagtccgttgccttccttcggaacacctcctcgataggagtgagagggtagaatttggccaacgacggcaacaattgccataccgcagctgctttgacgttggcgggcttctgtgggtgtctaacccatcggctctcgtagctgttcttagtcttgccgccgtatcgataaccagcaacatccatgatgtgttcaagtgataggttgcggtgcgatgttcgcggattcgagacaactctcgcccaccgtgtgtcccatcagatcagtatcgccttccccatcccttaccttcccttccataggctaatcggggggccacacggtctttttaccccactgagcttacgcatcaggctcgcaccctcgaatgcgatgactgtgatcacaagcatgttagccagcaccagttacagcagcacaccgctaaatgccataggcgagtcgaagtgcgtgcgatccggcaaacgttcttcccctaacctgcggtccgcctctctgaaacagggcactccagcgatgtcccaactcattgtgcgattagaagactacttcaacggacatggcgaaacatttgaatcgctcggatcacaagatcaacgaaatttcactggccgccgaggagatcaatatcgatagtgacgacgctgttgaggcataccatgggacgaaaaaggtcgataacgaaagggacctaagcaagatcgacatggatgccgtcaatcggtactttctcttcaagaggaccggggtatcaaaaggaaacatgcgcgaaattggcccgccatagatgagggtccagaaacaacgtcaccagccgccgcaactgccaccactgtactcgactgtttttaccaaagctgcgggctgggtgaccgggagacactggcgtcgaaaaagccaaaacacaaggagatccaccatctcaaccacatgacagctgcccttttcagcgggatggattcgattgagaaggtttcggatcccaggaaggcttacgtcaaatggaagtacgacatgttgcgggccaagaccgcagcccgagctgaaagtgaagaggacgagtatgaggacggtgatgatcgcgacctcaccgtcgatgaccacgataacggcgaagaccgcagaagtgatcgtaacgacgaagatgacggcaaggtcaaccgggtcaacaagagatacgacgaagatgtcggagatcagttctgcatccgaggtcaacaggacacagtggacggatgacgaacgcatgacattgatcaacctcctgagagagtcaggtatcaaaccccaccaagtctctacaaatttgtgtcatgaggctgatcgatgctgggaggcaatttacaagcagttccgtaccaaagctcgtgagaatatcctggccctttatggcaagaaacgggcacttctggaggagagtgacgacggagatgagccgggcccgagtatcactggtacgcacgacgtcccgactatgactgttagtatagatcgttgatcaagcgattgcttcaggttacaacgggaaacaccgtcgtgaggacggcaacgtctcgtctttctgcagttcataaatatgtcctacctttcaactcgattaccgcccgagggcttccacttttgctgccgtgattgtgatcgttacggaagttatgcttactccaattaatcattgtccaacgatcgaccgtgtctcgaatttcgcgttcgcagctgttgtccgatgatacagccggctgggctctcgcttatctatgcacgttcgaggtgaagagaaaacaaggacggcaatgcacacacaagtcgtggatcgagaacggcaaacgttgaagcgttggatcggctttgatatggtcgtaaatttatattcgttaaatgacataggccgggctgaaggctccggtcgactacgcatacatggcaagacgatagtagggtatttcggacggctgcagacgtttacttgtagttcttgcctgtaaagtgcgatatcatcagtcaagtgtccgggtgtagcggcgcattaaagtaacttaccgtcggcccaggccttgccgtcgacctccaaggtccagtcgaacgccttctcgatgaacttcaagtcatcctcgttgtcgagactgcaaacgagtcgatcgaagaatcagcgggtgaccgggaggcttctgcgcaacaatgatactcacgagagacgcttgtactcgaaagactcccagtcaggaccggtctggacgacaggcaagatgtcgtcacctcggcagacaagcactccggagatcaggctgtcgttggccttgcccaaaactcccatagatccgaactaccgatgagcgggaacgatttccaatcagctgtctggacaccgaacaagcgggcccaagcagaccgaagcagggtagcactctcggaatggagctcgtgctacctcgatctgcgctggatgctgaaacggaaccttgaaaactcacgaggtacttgcgggcggcttccatcctacgaacaaagaatgcataagcttccgtaagaaaagagctcgatgacatcggcttacctggtaaagaatcctccgatcaaattcgatgacatgaaaacgagcgtcaactcgtcggaaaatttgtagtccacacgccagatagagaagcccttagtgtcgaagctgatggttgtgtacaaggtcgagtcagtttcaggttcacaacaatttgcctccgaaacgcgacgccggaagcatatcgtgcggacgcaaaatgcccgcttgtcgcgagacaaccgacgatccaccacgtcgcccaggctcgctccgatcgctcgaaagcgttcaagtcgctcaagatcgctcgagatcgcccagagcggtccagatcactcacttggtcttgaagaagtccaaactcttgtcgctatcttcattcgagtacactcgcttccagttctctgcacaccggacgtcgttagcaccgccaaaaaaaaaaaactccaatgccgaactcacccaagttgaagtcgctcttgggcaggtcgtccaaggggttcttggccttgggttcctcggggaccaagggctcctcgtcatcgtcgtccttttcgacgggcttcttctccttgggcgccttgggtgccttttccttgggggcatcctcggtcttcttctcggccttgggcttggcctccttcttgggagcctggtattggggggcggtctcgacgtactggaactctccgaaaacctcggcgagcttggggtgcttgacgacgctgcgaccggggtgggaagcgagggtaattagtacacgatgattctcgcctgcaagtcgggaacccaacgccgacgctcacgtctccatgtgtcgggtgacgttgccgtacttggccctggtggccttgtcgacgtgacccttgccggtgaacgcgctaaagacgaccgaggcgacgaaaatgtcggccaaggtcatcctgtcaccgacgaggaaggtcgagtcctggaggaccttgttcaaggtgtccaatcgctgctccaacttggtaaagatcgagacgtacgactggagggacaacacggggtgtcagtcccgctatacttcaaaacacacactcgagacctcgctctaccccgaactaaactcacgggcttggcgtaggcaaagtacccagcgatcataccctggcagacaccgtggtgggaagcgatctcggtgtcggcaaaggcgcaccactcggcgatcttggcagcggtggccttgtcgtcggagaggagcttgccggagggggcggccatggcggctgatgtcggcgtgcgtccaggtagagcgaacggaacggaacaaggtgagaggaaagcgaggctcttggatcagctcgctgttcgtcattgtctaggtcacgcatccacgtctaaaattcgggcaaacacgttgtcgccatcgtcgttgttgtgttttctttcagaagtataacgataccactcgtcggagaatttgtcgacaaaagtcattaagacagggataactagaagttgtaaactcatcactagaaaacgaccgacaacgacggcgacgacggcgcaggacgcgaaacgcttgacccgggagtgtaggtggatggaacggggggagaacccaaatagacaccgaaccggacctctcctgacactcaccgtactgggcgatagcggccgactgctggatgcaggttccgtcggtcgattcgaacgagggaacacaaccggcagggaacttggcgagaaagtcgggcctcttggtggtctgcatgtcgatcatgatgagctcaatgtccgaacctccgaggacggcggcggcacgggcacgggcgacacgccagttgtctgaaagggcatggcagcggagggtgcagggagatcgatataagcgagctgattatggtagacaggcggacgactgggcaagatgccggggactcactagggtaagagtagatctttccgagagaagacattttggggatttgtttgaatctttttcgcgttctattgcgaggggtaggaaggatggaagatgagctgaacgttctttgcaaacccaaatctgtctggttgttatgggcgactcactatgagagaaaaggatctggaggagagggaaagggggatcgatacgatggcgaacgtattgaagggtgtcaacctttgtgcttttttccggtgccacgaccgacctcgcttcgtcgttccaatttctttcgtgtgattgcgcgctggagggaatgggatgttggatgcgcttcaatttggtaaaaacaagtgcgggcgcgcgaaagaacatgggtgtttgactagcaatttcggtcagagacgcgtagcaacatcgcagtccagacgtgtttcaagacgccacatgacagaggtgaatgatgatcgattgacagcgtgcgtgaacgacctgctttggggccaagaggaactggacagtagtgcagagcgtgaaacttatcatccctgaaaagaggcgggggtccgatccgtcacggaccgcttcccctcgtccctcctcacggatcatgtcgatgaacagggggagggccgttccgacaggtctgaccaaggattcgcccccaacgccccagtgggcttatggctgacgggttaatcatccagtatcaaacagaaccatccttctctcctgtgacgcggtccaaaggaccaacagagacagtacggtccttctcatcgaatcagaacgatcctcctcggataacatcatctcctcggaatgacatcgagaagaaatccgccttcgctggtctgagggaggacgccgctctgccctcctcgtgaacgagtcgcttcgactgaacgcctgttatctatccgagagcacgctggctggcagctcctgagaggcgggaatcgggatcgatcgggatcgtagtggatacggcgagtcgtaataaactggagagatcaatagggagggctaagcgtcgatcttccaattgaactggtgactggcccgcccacgctttctgaggcagaatgcacatacctcttcttctcacccccaccgaccgagctttctagtctgagcgcggtcgagagcacgtcgtggggcgagaagtacatcctggccctgatcttacccgccagagacgtccagaatgtggttgccaggacaacttggaaagacgacagaaatatccagagcggttcgatacggagaggataggaggatcacgtagatccggggaatcgtcaagggcagcataggggcagcatctcgtctgtgcctcgggacattgggaggcaggctcctcgaattgaggactacacaacttgtggatcgtcaatcccggtctgcgagaatgacgtgatgaccaccacggcgaaattgtagtagaagatgatactgatcttgtcgtcgtccgttgcgtggcagcgctggacggtggtatatcataaccattgggaaccataatcgattccacttcctcgaccgagtcgtgctttacagcactggcgtatgctgatcaacaggggttggattaccctgaacctactgttgcgctttgcaaacagtcgcgttcctggcgttttacgagccgaccgtttcgtcctgtcctggtaccaaaacacaaggcgagtttgacgtcaagtcgttgggcattcctgcacggcgaaccagtataacccattgcgtatcaacgacatggcacgtgttgcaatgcatagacgggctattcggcgagcacaaacacttaccatggagttgccacaaagttcagcacgtgaccacaagtcgactcgttgacatgatgaaaaccagatcggccagatcgtcgaccaggccaaggagggccgggagtttaggtcaacgggtagttctcgatgcgatcgaaccggatcttcggaatatcgaatcgaacctcgtagcggctgaacccgaacgcggacgaacctggtcctgcggtaagtcgatccgggtccgagccgcggggaaggacaactgccgatctgaccaaaagccacaacacagagaaacatcccgaggcccggctgactgcggggttcgagcgttgtgaacagctgacagaggccacagtcgatgaaaggcgtcgcatggagacatgtgcgatctcatgatctcacgatgttcgcagccagcaaccaggtcgagatcgcgtgacccgccaatcgctggccaaggatatccaatcttgaaaacgctccccgaggtcgagtcggccagggcacaggggtaacgttcgagatgagacggctccttcgaaatgaaagaaggacggatgaaggctccaattccaaaacaagactggtcgcgctcctcgcccgagatcgacctgtgttacccggcggcatgtgaacactccgggtaaccctgctttgataatcacgaaccagatcgtcgaccaatcacggagctcgtaaaggcgagaaagcgctcccgggcattgtagttcgtgaacacggaatccgagatacaagcgagagtcgatgtggaggtttccaaaaagttgcccctcggagtctccttgcttgcttgcgactttgctcgacaacgctggccataccgatcacagccgactctcgcttgcaagatcgtttgcgacacaaatcgagtttccccgcgcaattatcgtactgtcggtactgtcgtccgatcagtgcctcgatgacatgcagtctatcctttggggctgccgccattgacgcggtgcgttccttggtggatcgcaatcgggttccttttcgtctcgctatctgctccatcgtgatggcaattaccggcggtcgggcgggcgccagccagagggcggggggatcgaggcggaaagaaggggaccacatggcactcgatgtgatgtgttctatttcgagacgcgtcatcgtcgtcattcaacatttcccgcggggcgccctgaggtcaaatcacctgattactcccgtgggttcggttagagcacttcgcgctagtgcaacatcatttcgaactcgttcagaaccggggaaatgctggttgccccaagcagcaagcggcgagcagatgcagcagatgcagcagctgcagctacagctaggtccatcgtgtgaggcgcgaccatattggcatatatactcgaactagatcgacatcggatcatggaggggtgggggcgaattggctccagcgattcacccgcgtcgactttgatagcttcggcataaacattttccttcataacattcgagcaacccacgatgatggaggacaagaaggtgtttcaccaagaacaggccgaacacgccgagtcgatcatcgacgagaagcgacctaaacaatccatcagcgtcctcgcccacttgaccgagagccaggtgtttgccgacgtcgaacaattctgtctcgaccatggatttgaagacaaaatcgacctcttcaagagggccgccagggtggctcacaaccctcacgaggtcgccactttgcccgacctcacggacgaggagaggaaagtttgtgtcgaggaaacgacacacaaatggaggcatcccatcatgatgtacctgactatttttatctgctccatcggagcggccacccagggttgggatcagaccggagtgagtgccacaacaaccaccgaaaccaggacctgatactgacgcgcgactcgtgtttgatacagagcaacggtgccaacttgtctttccccgaagcgttcggcattgcagacaacgaatggttgatcggtctcatcaacggagctccctacctggctagtgctgccctgtaagccttggtccctcccgccctttgccgccgttctatgtcgtgactgacctccacctcggacacgctgtagtgggtgctggatctccgatcccctcaacttttacctcggtcgtcgaatggtcatcttcatcaccgccctctgcctcatcgccacccccatctcgtccggtttcgccaaatcctggggctgtgagtcgataccacgcaccgcgggacgttttgcaacgggacgcttgcttactcatcgcgcttcccgcctttatatagctcttttggcttctcgactggttttgggacttggtatgggtgtcaagggatctaccgtccccatctttgcggcggaaaactcgcccgcgtcgattcgagggtgagaaaaccggccttccgcgcggtccatcgcttgttaaatcatgctaacctgctcccttcttcgttcgaaagggctcttgtcatgtcttggcagttgtggtacgtttcggactgtagccgagccaatgttttgctttcctaaccctgtcgccaactataggactgcattcggtatctttttgggtttcgctgccaagtgagttcctgtcatggggctcgcctgcgattcgacagcgactgacccgtcctcgccctgcttctttcagcctcattgttaccaactggaggctccagctcggtagcgccatgatccctgccgttcccttggctgttggcatcttcttctgccccgaatccgctcgatggctcgtcaagaagggtcgataccaggacgcgtaccgatcgctcaagcgtctacgattcaccgaactccaggccgcccgagacctttacactattcactatcaatacatcgaggagacgaagctatcaaagccttctactttctttggacgaattaccgagctgttcaccattcctcgagtccgccgcgctactttggccgcccacactgtcatgttggcccagcagatgtgtggtgtgagtattattcagtcgttggctatgggctctgagctaatcgtgctcttatcgttgctcagatcaacatcatcgccttttactcgtcgactatcttcgtcgaggctggtggatacacccctcgtcaagcgctcgcggcctctttgggattcggagccgtcaagtgagtcgcaatgaacctacactgcggaagagatggcgtactgatgtagcccttcctcgactcgtagctttgtctttgccttccccgccctcttcaccattgatacgttcggacgacgaactctactgctgttcaccttcccccagatggcttggactttgcttgctgcaggtctctgtttcctcattcccgagggcaccgcccgtcttgctcttgtcgccacgttcattttcctgttcgccgcgttctactctcccggagagggacctgtcccgttcacctactctgctgaagtcttccctctggctcagcgagagatcggtatgggtttctccgtggccgtctgcctcggatgggctttcgtcttgagtttgactttcccgaggatgcttgccgttatgggtcccaccggagccttcggtttctacgtgagtctctgagctgtaggacagtcgctgtacgaacccactctgatcgattcgctttgcaggccggtctcaacgtgcttgccttcatcatgatcatcttctgggtacctgagacaaaaggactcacgcttgaaggtgagtgagggacacacgtctccttagttctctagctaatctagattttttgggcccttgcagagatggattttgttttcgacatccctacccgaaagttcgccgcttaccaggtcaagcacgcgattccctactggttcaagcgctacgtctttttcaacaagtcggccaagcttcaacccttgattcactcgcgagaggatcgttcccaccgagcttgagcaggtctgccgtaatactgaggccgatctctatcttgtcaatcgatgtacaaaataggtattaatattctcattgtctaatgcaacgaccgactggtagtgcacatcggtgtctgtgccacttctatttgttggcgtgggtcccgtggaaaaacggacagatgcgagctgaaacaggaaggtgaggcgctgcgcgcgttattgatgatgcgctcgacacaagcggtctaaagtcatgttgggcataaacgtctgcgtttcctctaataccttgcgaaaagtcactcgtaccagacggtactgcatgaaggggacaagcatgaatctgccaactaagtgtcgctggttcgaccggaagctgaggcctcgtctcaagatcgatctgcccatgtcgcgcgggcatcgatcagctattcgctcaacttggcccaggcttgaccacatcccgccagcaaagcgcacccaagtttccttgtcttgctctccgtgagccgtagcatatttgcgcgcgaccgcccaacacctcttgctatcgttgtctacaaatctgtctgccatcttgtacctcgaatcgactgtggagactgtccttcaagattccttcgggcacgtgcctgcctaggtctgttgcggatggatctccgaccattcggacggatctgcgggtctctaccatcgagtatccaaaagctctgaagtctggctcatcgataccaatcagctcgtgaggcttgcccctacggagatgtagccttctgtccttctgtaacccgtatcagacagaacgatgatcagcttcagtccgcgagtcgcagaggcgaagtatacgtgtcgatgactatcgcacggtccttccgtcgccgaaccgctggctgcagatctctcaatcactcccatcaccccaacgtgtgagtttcaggttgtctcgctactgtcgacatgaaaaagagaagcgatcgatgagaacagtctcaacctatgcagtgatgactatggcgccacgtcgaagcgcgagtcgctctctccttgtcaagcgcgtctccttctctccagcgcgaaaccccccatcgacgacgtctgggctggtgatgatgatgatgatggtggtgtcgaggtcgaagcgatatcgcgatcgaggtcaaatcagcctagccacagtctgataaaacacatcccgttagtcttgcaatcatgtccatcgaagacctctccatcaacgactctccctccaactcggtctcggtcgagctcggcaggaacgagaagaagtcccgaaaggctctcgagggactcggcttgaagaaggtcgagggaatcaccagggtcactttgaggaggccccgaggagtgagttgcatatggttcgaattttgagcccgaagtcgctctgggttgggcagtatcgggtggtccggagtacacaaagcagcactagcatggctcgagctggatctcacttaaaaagagccgcatactatgtccatcaattggctcgagcagatctggatgtatccgagccgcccttgcccgacctggccgtctttcgatttcccattatacgtgcggctagctgatcaaacgtcatcgtgcttgtaccccagatcctcatggtcgttgccaaccccgaggtctacaagtctccttacaccgactgctacatcgtcttcggagaggccaaggtcagtgcattatcatgtctcgtctggatccgtactccgtcctgaatctttcccgcattgacacggacgactacagctcgaggacaactcgtccgccgcccagatcgctgccgcccagcaggtcgccgcttcgcagcaggctgctcagggagctttggcttccggtggatttggacctgaccacccccagactttggaggacttgttgagggaggccgaagccggtgaagacgggtgagttgagcatatggaccatcgggtccttatcgcctgtctggctgacaacaagcgttcacctccgccgcgttttggtaatcacagtgcccccgagctcgtctcatcggatgacaagcccgctgccacctcggacgtcgagccggatgagaaggacatcaagctggtcatggagcaggctagcgtcgagagggaaaaggccgtcaaggctatcaaggaggccgatggtgatctcatcaacgccagtgagtctcgatcgagcgtgttttctctggccggcacctttttttggtctggcagttgacaaaccgttcactgactactctgacttttcgtgctcgtctagttgtcgccgcccagtcctaaaagaagtgagagtctagggagtaacgatcgtaacaggttgttgagaacgaggagaagagaagcatatcaaaatgaataccttctacgatcttgcctcctctgaaattcgcagagtggtgtgtgtggtacgtgcggggctgtttctcgatgatggggctgtctttactgcaagtgatcactccggggctcgaagcagtcgatctcccggtggcaggtgaatatcgactggcaggctcccggcaaacaaagactatgaggcagatcgcgatggccgtcaccggtgaccgttgtgagacgaaccgacgcatggtttgactcatgaagagtccggagacgaagactaagccgtgtatatttggtggagccggaaaatgaagggtcacgttagaccttggtatgaatgccaagtgggtgcgtcttctcgatttcggctgcagagcgaagatcagcatcgtcgtcgaaagggtatgggatattcgactgacctttgaagtaatcccacatttctctcgccttgaggtgatcataagcggcaccaagaggctggcacatgacacgcccgacatccaacaaagacagctctggtagatatttcgactggatagcttcgatggcccggtcgaaaggcagatgtctatgtctgtggcgagggcatgtctgtaggtgccgctgagaccgctgggacagacttctcgcagtcgtcaacttcccgaacatgaggggaaatagataagcgcgaggatccgtcagaggaggagattgtgccacctactgttgctaaaatgaatgtgcgataccatccctctcgacgagatttctcggatttcttttcgggaattcagggaacggatattaaggtcatgcttctcatcaggcgtgaccggtcaatccgttcgatagtcatggtcggtggtgagctatttgtcgaactagttgtcaatcctgcccaaccttgttgtagtcgtctggctgtcgcgcgtcagacgacctcgagcgaacgaacgatcaagagttactacaagttgtcaacaggtcatctgtctatcccatacaatcaccgccgatcacccttgttacagagtacattctacccaatgacgttcctcatagtctcgctataactgctagcatcaatgtcgttgacaacatgacgtacgatctcccatcgacgttgccttcccaggccgtccatctactcgtcctccgagctcttctctcaaacggcttcgaatcggcttctcaccaggcgaccctcaccttttcctccatcctctcccgatacttgggcgtgctcgggcaagcttctttggacaatgctcaggattcggggaggagagtcgttggagtctacgatgtgctcgaggccatcgagtcgatcggagggatggggctgactctgatgcgagaggttctcgaggacgatctagaacgggaagagggtcgcctcgtatttgatggaatggacaggctgggaggttagcttcgtctttctgcctgtatccgtgatctttgaaggtctttgcggctgatcgttgatattcttctcgggtcatacagagcaaactcgtgacggtctcttaccacagcgtgtcctgcaacaattcgagtacgaacccatcccgatgggagctcccgtctcgctgccagcatcaccgtcatccagtcgaagcaaagggacagattcggacgaagatgatagcgacagtgatgtcgctgaaccggtgcacatggacgaagacgaggggtacggtggaagtgaggacgaggcggacaggtcgtcgagagctacggcctcgagacttttcgagcagaaacaaggagtctcggatacgctacacttcgaaacgaatgggatcaaaggcaagcggaaacgaccgttcggatggatggaggacgaaccggacgaccctcatgatgctgcgtatcttccccctcttcccggacaaaagcgtaggaaaagctcggcccacgatgatctcgctgctcaacgactactagctttatcatcgatcgattcctccacccgcctcagtcctgagcccgactctgcaacagtcgagcgggaacttacgaaccgacgagcgaatcgaacccaactcgacccgtacacgtcggcgcctatcccgtacgcagcgtccgccttgcgatacgctcatcacgccccaggcgtcggcacagggttcaagaaccgctctgcgggcgctccacttcccattcgacccttgattcctgacacgttacagagcctagtcaaggcgtaccactctgccaagaccgccgcacgagatccgccccaatccgtcagcgctcgatcgtaccgggccacggtggcggaaattatatcgcatacgactggacatcccgcgccttttatgctagctacgggcacacttcaggtccctggttcgagcaaggatcatacggggacgatcccacgaggaagtccatttgtgccgtcctatccggtttacgcatcatcaggattgcccgtcaacaccgagcacgagaaggataataagcgaccagagatctacccttcatcgcgtctatcgatcaagaccgaagagacgtacccgcccaccctcgcactctccttgcaaccctcgcccagacactttgacccctcccgcccaacactgctcgagacggtcctcaccgaattccctggtcatcccgatcccagcagagagacgtacccgttccccagatcatcctggttgaaaccctccctggtctcaacacacacgagaatagctcctccaacggccctccgggtcgacgccgcccgtgcagcagaggaagggctgaatgagggggatttggcgctttatggagaacccgtgcgggctcccggtcagcctgatcccgagggcaaggccgcaaagcgcgcgagggacaagaagaagctcaaagagaaggggcttgtcggggtacccaagatcaagtttacgatcaacgagtcggcaacgggtagtgctgccggtggggacatgatcgggcctgacggccaaatgatcgggggagacaaggtcgaggaaaaggaagaaatcctgttgagagccacatggccgatctcggaggagcgaggcgattggcaaacacgtctagagctacccgaggagaatgcgacgaacacgggcaatttgatcgcctatgggtggggacaacgaccactatcggtcaactcgagcacgccgatggagcccgactttgtcggtcaaaggctcgggggtatcgtaaaacaccccaagatcgagatgcccaattacggtagcttgggcaagacggacagcggacatggtggccaggcgacgcccatccggcgtgcgtcaagcaccgtgtccagccatgcgagcactcccagcgatgcgacgatccatccatcgagatcgatcaaattcaagctcaaaacgccaatttcggaagtaccgcctccgacccctgggtcatcccgtgcacctcctagcagcatgccaccacccatgaccccgacgcccggtcaagagcagcgcggggatgccagcttcagcagtcaagcgtccagcgcatcccacattcgccctacatacatcaaactcaagctaccctcgcgaccaaactctcatacgacgccgtctccgggttcatgattatgatcgcgcgtgtgcatgttgtatgatcttgagatacaaaagtctagagcatatccatctatatctatgcagcggtaccctcttaagcttcgtcttcctcccttggatttttgctgagcttgaaagatcgggctacgccgaccatgttgaaaaggcgatgcttgggattgatcttcttgagcgtccggccgatcgcagccagagcttcatcctcctctacctgcgtttcgtactctatccgcctttccgatatagaatagtgtccgacctcacaacggagcttgcgtatttcctcgtagcccgatagttgaaactcggtggcgtcctcgaacagcttccgtacatctggaggcaaaggagacgcaagcacttctagacaacgatcatagctcgtgtagagcgacgagagatagctcgtgtccgtttcgcgcaaaattgccgaattaagagcggtgaagataggagagattttcgccggctgctgtagcgtcttggcgtgttgtaatagctgcggtaaagcactggaacaggacatgtcagtgttggcgaatcttgcttgtcatcgagcgagactcacgagattgcattctaaaggaaacatccatggccaagaattgatacgtcagctggcgagcggaccccgttttcatagacgacgtcaccgctcaccactcttgcagtgggttcccagatgaaatctaccgtctccagcgttgcagtaagagcctggtcgagatatggcgcgaatgtcatcgcgtctagggtcgataaatactctggcaaggcttcaaaggccaaagccttttcttccatcgctttcgaatcgatagctatccgcgaggtgaggtgaaagtcgacaatctccataccgggagggagattcacttcgtcttcggctccatcacctgtttcacaatgagcaagcgattcgttgcaccgccacactatcagacttaccctccaatggttggatggttggccgagcgctagccttctttagaagatccgggatcacgtagccgacgtaaggcgcaaagtcggatcccatgactcgagctacctttgaccaagctgcgcagaacgtgtcaatgacgtctctcacgatgttaagtccggttggcttactctgagcaatgtagctagcctggaaatcgtcgtccggggagacttcggctagagcctcgcatcgatgtaagcggttgttcccggcggtattcgcacagtgtccgatccttaccttgcgctttcatcagttccttggcgactgcatcgaggtgtcggatgactgcctgtagagagagcagacagtacccgcggtaagcgcttggatatgaggacggccgtgatcccgactcaccggcttgccgacagcgacggcaatgattccggacgcctcgaaagctctacacctcagcaagcgataatcgtctccgactgctgttcggagaatgtgcagcagcatacccatgacatccgctaccatgatgacgaccgttagacatgttgacgtggcacgctgcacacggtgataagccgcacgaaccagtgtagggcgcgaagcttccttcagcaatgagggccaagtaagctgttgacgatacgacccacgtaagccatcttcaacaggtttcatcgagtaacactaactcacccaaagctgttgtacattcttcctgcatgaacttcggtcctgcttgaatcaaggctaccatcctgtaagaaagatcgcgtcaacagcgccggggaggtcgagaatccaaggccaagactgacctggtcaccaatgcctgcacgtgggccgggtcgatatcggtcgacgtcacctctgtcagattgacgagactcaaggcgctctggcattggatacgcggttctgggtattcgaaacccatccgcaaggctctcagactagcgtcagccgcggaagcaggaaagtcttcctcctcgaacgccagtgccaactgcccgaccgtatagatgactgcatatctcacgcgggcatgcgggtcggagatgcacgactgcaacatggccagaatatcctgacacgtgttctccttgtgctcctcatcctgtcggattgacaagttcagcctgtcgacctttatccccctcaaacgtcgacatggctcacctccatgacgctcgacatgacggccgagattgccatcaaccccgtatgtcgaccacgccattcgctcaattgcaacagctgtcgaatcggttccaagatcagactcgatgccttgtctttccttcggaagctctgagctgtagtcggccggacgaggcgatcagccatacgtgcaaacgtatcaaacgctggtcacgaacttacggatggcatcgaataacctcaacaaggcgtcttctggttcgttgggataatcctcgttgatgacatcgagctgcccgggccggaaacatcagtccgaccgtccaagcttgtagctccctccgcctatcgcgtcgctcttacatcatctgcttgtaaccactctttcagatcctcctcctcgtcctcctctgatccgagcgccatgtacatcctacccaggagcatcttgaccatcgctcccttgtcctctgtcaagatcgacctcaacggtgcgtaatccgccgtctctaccagggtgaggaggaactcgagagcggccgagtacctctcctcgtccagctccgtatcgagcgctacgggcccttctgctggattgaccgaggtgtaggcggaaggttgcagcaggagtgggaggtgggacgatgcgcctggtgggggtaaacagagggagaggaggtacttgtacaagttttcgaggtggcgttcaaagaggtgaggataggtcgagaggatcgacgtcaacggggtcgaggcgatcgaaaacttttcggcgtcgagggtggtgaggacctgtgctttccggaaggaagggaggaagggaggaggggggatgaatcagcgcgtcccatgagcgatggcatcgctcggccgatccttacgtgacaggccttgccgatcaaatcgctcccgacctcgtcccttccatcatcctcgatatgctccccctccaagaccccctgtacggccctcacggcagccaacctgacgtcgacgaaatcgtcctccatgccctttgagagtagctgagcgacgtcgccggatttcagcgggatggcttcttgtgacgtcgatgtgctgaaagagagtgtaaagaggatggaagggtagtggatgacgagttggtagaccgagaggcggtgcagaggggatgtcgaggtcgctagtctcagcaggacgggcaggagagccgggacgtctcctggtagaccatggatgcggcagtagtcaaggaggcaaagagatgagctatttgaaggcggttcgatcgtgtgacggagggaatgtacttactgccacggctcgtccactcttccatccacttgcccacggtatccgccaaccctttcctaatcttcccatccagctcggtctcgagacatgcgatcagacatttaaaaatcgaatccacctgatcgtccacgagagcgtcgaacggaaagtaagtgggtgggtcgttggggttgatcggggtcacgctgatgaacggttgtctccggagcaagaggagcgctagggttcgagatccggtagggtaggctcccgcaccctgggcgatgagggcgagaccctggaatgtctgataagtcgcatgagtcacgtattgatgcaactctgcttcagcgctgtcgacagaaggcgtcagagatgatcatcagctcgttcccggacatcttgcgttgctagaaatgagggttatcgtacggttttcgaatatgttcttcaccctgtagcaaattgtggagcatgggccccaaggcgtgaacgaccgactgcatgctcgacatggtcgccgaattcccgatcaccgttcgtagcaaagtagttagctgtatggacctcactatcagctagatatatcgagatgaatgacgagggggagtgttggttgttgatacagcgactatcttgctactccctggatgatttctctcggttcgtcggatcgaaatcgaaatcgaaaacgtaaacaaacaagcgaacatcatcgtctagttcaatataacaactgctaacatatcatctatacatcgccttgtcacctctcattgatatcccacctaccagtcgtcaagtaaagcagagaggggacgctcttcctgtctgactgtcgacaacccggtcgggaatatccaacacaatcaaagctagctcgactcgtatatcgcctggtcaacaacgccggcttcggtcatctcatctcgcacatatgcgatacgaacagtgatgatgacgctcacatcgtcaatcccttcgaacccttcgtctcgtcattagcaaaaatcgctcgtcttcaatatgggcgtcgctggactttgggaggtgagtcgatacgccacgccctgactgtcgagcttcaaagacactcaaccgagaccataaaccctttattcaacaacaacgactagatcctcgaagggacatcccaatccatccccatctcccgccttgcactcgaaggtttcaactctcaaactgatcctcgaaactacgccctccggatcgggatcgacgcttccctctggatattccacgccaaccgtcaatcctctcaagcgggtctcaacccgttcgtcaggacattgttcttcaagacgctcaaactactgcaacatccgatcttgccgctgttcgtgttcgatggaccgtttaaaccggggatgaagcgtggtcaaaaggtagccgggatgtttgggacgtatgatcaggggagtagacggttcaaaaagctgcttgacgatatgggtatcgaatactggaccgtgagcatcacaagcaggtgatcgtgggcaaggcaaacatcgttctcacttcgacctcgacttggggatacccgttaccttgtcttcaggctccgggggaagccgaggctgaactggcggaactgtctaaatcgggcaagatcgatgccgtgctcacggacgacgtagacgccctcgtctttggggctaccaagatcttgcgaaagtgagccttgacctacctggttgccaggcccagcgtgtcccaggctcacagtacgatcctcccgcctgcacgatctgaagcacgtcgaggacgttgtccagtaacaataggctcgtttacgataatgtcgaggatttccaagtttatacgctggagagtatcactcgtcctgcaactcgaccacggaccggtcgacgaggcgcgagtcgaagcgaggattctacttcaggggaggacagcgatgacgacgacgacgacaggatccagaggtcagccaagggaaaaggcaagggcacggacaagagcaagggactctggaacggcttgagcgtggaagggatgatctttatcgctctgtgtagcggtggagactaccatacggtacgtggagagtgtcactcctcttcccaggctatcgtgctgaacaagtttgtttttgctggtgcataggctggaatcccaagctgtggtgagtgtccttgttttggtacccaaagacttgaaatctatattgacctgcatggacgctctcggccaggtcccaagatcgcccacggtctcgctcaagccccttttgccgtcgaactgatcgacgcctacaaggccatgaccgccgcgcagtttcaagactacctaattggattccgagaatccctcaaacgcgagctatctaccaactcgctcggattcttgccgaacaagcggaaacaactcgctcaaaccctgcccaccacttttcctcaggtcgagattctcgattattacgtcaaccctcgggtcagcgagggacaagacgtctggccaggtttcggtcggcgagaagagggaacgcccggggcaggcaaacgtggtgggcgaggagatccgaggtcgtttgctatcgtttgcgagaaatactttgaatgggggaccaaggaggaagtgggcaagcgcatgaagacgctcgtctggcggggagaagtcatcaatcaattacgggaaaagctgctcgtcgctagcgctcctcccgcttccaccgtgggcacagcaggaggcaagacgaagaattcgcggatgacgtcgtactttcagaacgtctcgtcgagtcagacttcagctcgtagctcacaggaaaagggcaaacagcgcgggctgggaccaacgagcagtacgagcagcttcgaggacgacctggacgtctttccccgagcctaccttgtgaccatacactcgacccgccagcacgcttctactggcatgattctcgagtatcgaatagaatacgatcacaaggtgtggacgcggacagttcaggcggccatgcaggggacgagagtcgatcccgagctgcttccagagcaggatagagccgcactcggcttgacaatgaggcgagacgaagatcgcgctggtagtgtgacatcggggacgggggacgacgaatcggtcagtggtcaatcgagtgaccaccgaatggactgcacgcctcgagccaaaggcaagaaagacttggatgcaaacgacagactatggatcccagcccagcttgtcaaggcagggtggcccgacctcgtggatgcgtacgagagcaagctacgggaaaaggctgaaaaggcagcactcaagactcctcggcgtacaaagaagacggtggacgtttcccggactgtttcaaagggcaagactccaagccctcatcagaccaggatgcgaggttggactagtgacgaggagggctttgaatcgactagcccggtcaggtcgaccgtgttgcaaggatggctaaactcgggaggtacgctcaagaataccagttcaatggcaccgagtccaagttccggcatggcggctggcaggacccgagcgatacgtacaggaaccatcttgccgtcggatcctctcacggtccggtcatctccacctccaattcccattcagagaccttcgcggccggcctcgtccagcgccacgtctgtcgctggctcgacatcgggagaggagtggggcggtacaccgcgtcgccttttcgatacgcctgactctcacacgcctaagcgcaagtatgtttctcggcgtgccagacctgagactcgtcagacggtggcggtgaaggatgcatatactacgcctgtagctcgaccacgacgtcgagtggtgcattctccagtcgaagtcatcgaaatctcgtcgtcttcagaggaggacgaggaagaggaggaggaggaactggaggaaccagtacggcgtcccttcatatcagccgagccttcggctgggactgctatggatgacgagaaagcagaagcagacgcagaggaggaagaggaggaggaagaagaagaagaagaagagatcgaggagcgacctcgctcgctaagtgtggtacaacccgctatcgtctccccgccaaccttcttcacgagtcacgaatcaccggacaagacgcctacagccacgaccgcgctccgaaaaaatcaaaggtctgcacgacgaccgtccacgacgcccaccaagcgtaccattactcgcttgtcgggcgatggagacgctggaaccaagggtacgatcgccgcctttttcaaaccgatcgcacgaactggaccaggccttgatcgtgggaatacgaacccgctgaaccggagttacagccttgacgacgaattcacgaataggacggcgataggtatacacgccaccgctacgacacagactttgccgacgggcatgaacaagacgacgacaacgacatcgatgcggttctccgcgcagcgaaaacaggtatacgtgctcgacaaggtggtcgaagggatagagtattattcgttgcgagacgttactccgtaatgtattcagtttagcctcgcaatgtgatcgatgagacggcaatgcgtgcgaaagatcaaggttgttatgcgcaaacgggccgcgcaagagctgaaaggtagcgaaggcaaggcggatctgaacgtcgcgacatactaggagagaacaccaaatgaccggcagttgcaagtgtagtaaacgtcatatcataaactagatcgcatcgcacattctcatagccgtacaaattaagcattcaacttataggtccttagaggacccatcagactcgcttcgaaccgcccacgggaggagggtacgaatcaacaatctggtcgcgaagacacagaattgaagacgaccgctctccccgccaacttcatcgatagacgccgaacccggtacctctcaccgacaccgctcgatctctgaaagcccgaaagcgatgcaaagatcgtaaacttgcgccatccacatcacccgcacgaaagtctccagtcgcgcgatgggtgaagggaccagacggtgtggctcaaacaagggagtgggaagcgtgttgggatagttggaactccgtgtaggttggacgtcgaaggtttaagtcatcagctgggttgaagcttttgtggctagtgtgaactagcgaggatcagttagctgctagaaataaatcctgcagactgtgcgacggaagaaatgggttgtcagctatcgtgctcgaaggcggttgcaagtatgggggtcgagagagtactcacgtatgatcatgaagaaaaagaaagagaacgtgtagaaggagaggaagtatcgagtcgagatatcgtttactatatactttttctgcgcggggtaccaagcggacattggactgtttttttcgctcaactggctgaagaaaatctgcaagcgagaggtccaaggtttatcgccgaaagaggaaagttcgagaagagctattaagaagaccagcttccgctcacgtaagtcacgtaagtacaacaagcgctggacccgcttcaggcgcgcttacattttgtgccatcaactcgccctcagatctttcgtaaaatctgcgaggacccgttttgtatccgcctggacccctgacgctcaccctcgacctactttatcatttcgactttgtatcatcaaccacttcaatcacacccgcgattgactttcctcttttcttaacaatctaaaagcgtacgtccgaggcctataccttgacctctttaacatgacattgactcgagctccgttttcatctcgcagggacataaaagttcgagctctgctccactctcgatggctaagctcgcgttcccgtctgcgagaccaaagttcccttcccccacccaaagagggggggcggggtttcgtctttcccggtactcacccatccttttcagatcgttcttaaaaccagcgttctcgcagtggtgaatccgcaagtggctctgtgaccggctcgaccgtccgtactcgtactctgcgattttcgacctctggactcgataccaaacgacttgctcgccgttcgtatcgtcggttcgatcagctttaccacacgccgctccacgttcagggatccctcatacgggtctcttcctggttgaaaaggaccgggctccaccctcgactagggccttctgggtcggaatctttcgggatgacgattcagtcggccaccccggtctacttccctcgtcctgcgcgctcggtcctcgcaagagtcgatcttgagccgcagatgttgcttgaagtagtcggcggtttgagcgggatgaagacgatgggacgtggagcggagcggtatcggtggtcttaccggcgagaggcgaggattttcgcgagtcaatcagaggaagggtgtgagagatggaggtgggacggttgggcggtagcagggctgggaaggaccgacatttgtttccttggtcgtcatttttgtcgtttctcgtatatcatttgattgtctttgaatatgcatcattgctccgcatatttactttcgctgccccgttcctcaccacgtcgtcattggctgctgagcatcactggatgatggacgatctgaaagggacagccagccatactgccaacccagtctgcgtgcagaccacgagccagtcaataaaagtatacgagcgggtcaataccgctccggggtgcggcctgtgtggcgacttgactctgtcgggcttgcggtgctacactacctggacgttcgcaaatgaaccgaattaagctgaaatccctggtcgtgcgtcgaaagcgtacaacttatgtacttctcatatgattttctatggacctcgctcgcttagtagcagcgtaccctcaagacacatccccatctgccaaatcagacaatcagggttcgactcgtacagtcgactctgctttttaagagcctccgggcttcctttttggagggatccgacctttcaaaatgatctggggcaccacatggcgttcactagacaggcgatggtctagcgcatgcggaccggacgcgatgttgtcgtgcctagagttcgtaattcatcggggtcgccggacagtatcagcgccgtcggatggttgctccagcttgcgtaggataagagatcttcatcgactatatatcattgttatgagggtccgcgttcttgtacggttagtggagtaggggcaagcgaagagtgtcggatttgtgtttgggtcgatgcttcgagatttccgcgccatgtgccgatctgtttctgatatgacatcccataggaaaccctccctgaggacaacactggtgcagttgtcacacagtgtccttccgctcctctgcatatcagtccgattcatgaaaagttacagcgagaacaatgtcacgtcatcatgaaccgatcgtcttggttcttgtatgcgagccggactgactcgatgctgtggaaatcggcgatcagccaaaggttctttctcgtcgactttatccctaacggctacctatcaagagcagagagaatgaaaaagctcagaagggcacaacccgacgtcaaaatggaatggttcgtcgatcaggttgatcatttgtcactgatggcgtggagagagatgatcctgaccgtcgattatgaaaggtacattagggagatggatttatgaattacatttccaagtgataccacgcctggcatatcgaaccgagaattcgttcgcccgtcttcagccaacttccggaccgctcatagagagacatgaagaggaccaggacgagctacgactcgagtcggcgacgacagcactgtccgccttgggaccgccgtcgaattgaccccaaaggtctcatctgtaacgatgttcactgagaggcattggatagggtatggaagatcacctgctacggaccaccagcctgcgatatcgccatgcgaggtccatgtcatccctgttgaaacgcgctccatgaaacgtccaggcgcgtgtccgggtgaagctgagatatgatctgtcaatcaaaagcgcggcagccaaacccgtgcgcttatcaaatctcaccacaaggagggggtcgagcgcgactgaaggatttcgcgagaggatatatagcggacactttgtcagaatcgatcgatgtcagcgtgatgcgaccgtaccatgcaattgtatatcatcgtttaagccaacaccgacctcttgacgaccgtctccaaggagtcatggtcaagaggtcgatgctgcgaccagccagcacgaatgccaactagtaagaagattcacttcgggcgtcgatcaaattgtgagcatcttttctttcttttccgactgcatcttcccgtcttcgcctcccctcgcatcctctatcttctccccactccccactaccttttatgatgacctgagtgcatttggctggagttcttccataccctttccgggtatgaaggccgatgtgccttttgttggacgatgccgaaaacttctcgctaccttaataacacacctctgaacatacactaccccgcaatctcttcccgaacctctgaacgaacaccgcatataggagcgagtagctgactttgctctcgctttgtctgctcgaaaagattacttcccaatattggctctcatgctatgaagaaattataggtacgtctacccttcgttgcccgtggttacccgtcgagtcctgtatctctgtagtctgcccatgtcttcgatgcatatctcctgtcatgcaccttgcgccccgtccatctgtcgtacttttcggttcccgcgaatcgtcctgtaacaaccaagtgtgctcgttggtcgggtctaacctgctagctggtagtgacgttgtggatatcatcgtctcagagcctcggtcgcgggcggtgctcggcccaaagttgaacatctacttttgttcaaagtcgcaaagtccaacgagatctatcatctatcatgctctatcaacgtcatcgatcgctttagaccttgctatcaacaggtcagactacaaacgagcattcacacgatcatcgtaccacccgtcttgcatcatgacctaggtcttgccatccatcttgactctccactcgcccacaactgaactgccccgcatcatgtcgaaccgcgtcgaagacccgacctcgctcttccggcagttcctcaacaccctctcccggatcccctcgacgacgagccaggatcaactggacaagctgaccaaaatgcaaaaggtgctcgccaaggaggacaatctgatctccgaccaggatcttgctaaacgggaaaggctcgtcaaggagtacgaggacgagttgaggaagagttccaagcagagccagtcagtaccgtgcttgtcggggatcatactgcgtgtcagagcattgagcttaacaagtggtccgaatcgtgtgaatcagactcctcggacaagcgtgcgcagaactgcaacatctgatcgatgtggcatcgaacaaacgacctctggaagcctcgtcatcctctgaccaccctgctaaacatcgcaaacaacggctcggcttgggttccgaatctcgagcatcgcctgccatctcgaatcggtctctctctcctcacctcgctctctctgctaccgcatcatcggtctcgcagcgagatcgcgatcgcgatcacaaggacaaggagcgtagcaagcataaacgctcgaacgcggacggcaaggacccgcgggatttcctgtatagccggcagctccccttacaaccaggacggaggatcgctttcaaggctcccgggcatgagaacggaggggcagagtcgggctggatcttggcgaccgtcaaggggatgaccaatggggacaagaccaagtacgaggtggaggattcggatgcagatatgccgtgagtgacccccgctcgcttgacctcgtacgccatggctgattgtcggcccaaatgatattttcccgccctggacagaggcggtgtacccgtgactttcttgaccacgatcaaatccatcgtacccctccctgacccaaacgcgcctcgggattcaccatcccacccgaatgcgtacgaagagagacccgtcggatccaaggtggccgccatttacccggacacgtcgagtttctactgggcgaccgtcctccggtacatcgaaaagccgggaaccaaggggacatatgtcctcatgttcgaggacgacgagaatcacgagcgcaaagtggaattcaatttcgtcatagacgtgagttcacagaattgctacatgatgacagcctagcgaccttggctcatatgtcaccatccggcccgcccgcctaaaggctgccgctttgggagaacgtatcaaaggaaaataggatcgaaattgtacacaaggttaccgaccggacgagcggagtgaacaactgtacccaaggagcatcgattggaggtgccttgtaacacatgaatacatggacttgaagcggagacggatcgatacatcctttctggctctctatctcaatcgtccgccgcaatcaggaggcaaacgactcccctaccgggacgcagcgtatggcagaccaagccctcaggcgatgcacgagtccgccttttcatccttggcggctacttttcactaggttccggggagactgaagtgattgtctcatcctgacatcatcttgtcttttcaacgcagcttgtgaggcgtcatccccgcggatcaaaggaggtatgtcaatgtctcagcgatgatagctgaacccaagcgactcgagcggccggggatataacgcttgcgacctagtcaggctacaatctgcaagcattcgagcttcatgccgctagataggcttcgagctcggcctactgctctctaagctatacgcaccagatcttcatgcaatttccgggaacaagtctccatcgaggcgtgggctcccaaagtcgggagttcgatctcgctgagagtaccaacaggcctcaattccttgcagcagacgatcaagcacgaagcggtacaagctgttctctagagtatcggaaattgaagggatctgcagaaggatctgtagagaaacttgagtttcttaaagcaaaggtcagtggatagtgacacggtcgtttgtcttcagctctatggttgatacaatcaggatgggaaacgcagagtgatcaacgacttgaagacgcgtggaacacatctgcaaaatctcggaccccttgtgttccgttgagagcggctttccaacccggcagatcgcatcaggtgcagtctatcgataacgcaccgaacaaacaggcggcgcggatcaacggaccggtccctctcggtatgcatgcaagatgcaacatggagccagctgcaatccagccgctcagtctgggctcatctgaccattcgcatcagtccagcaacaccatcgatactgtcggatctccggtgggctcataggtggggtatcgtagatagagcccaggtttaaccctaatgcatattgtgaatttgcagactggccatcttttactcacggattgggaaagagctactaagagctactggcaagaaaaagaattactggaacatacgcccatcgcgtattacgggtccagttcgctcaaagtaccggattacccgatacacagcaacttggcaccgggcgctgccggagtacctgtgggttatggtccagagccagtatacaacgccgcgttccccgcgttcgagccaccacaagggaactcataccctgcgcacaggcccccgagcactttcaacactatcggacccttaaattctagcctccactacaatgacaacagcttcaaccgcttgggtcccagctacgctacctctattcccgattgggacgacccttcgactactcaaactcacgcaaagatgttgggcggtcctgtagactttgaaagcatggccgcgtcccagacgcacagtatcggtccgagtcgtgacttcagcgcaagaggccccgcggccagcacggccttctcgatcaacgccaatgcggacaattgggtaaatgtcccagtctcgatgttcactcggtgaaggcgtctctctgtgtgaacgacatcccagaaccgagtcacgtatgtatcctctcacaacacatcgtttgccttcaattcattgtattctcttcaggcgcgtgtccttgcgttgtacaattgcgattcccattcccattcccgtcggtccgaggtctaagccttgacggccttgatcttctcggtcaactcgggcacggcggtgaacaagtctgctaccagtccatgatcggcgacctggaagatgggcgcatccgggtcctacgacgtatggtatcagtcaatcggggttcggcgagatggtctcatcgatcgagctggaaaaggctgacgaggactgaccttgttgatggcgacgatcatcttgctctccttcatcccggccaaatgctggatagctcccgagataccaacagccatgtacaattcgggagcgacgacctggtacatcgttcgatgcgaatcgagtcgggtcaatacgagtggatccaggtgtatcggtgaatggagggcggggggaaactcaccttgccggtctgtccgacttgcaacgagttgtccgcatacccagcatctaccgccgctctcgaagctccgatagctgtaagacaaaccccccgtgccacacttatgagtctcgatggtcccctttgacgagactcggccgtaaacatccgcctggaaacgcgggactcaccggccgaaaggctgtccgcgaggggttccatgacgctgttgaactgttccgcgctcttcagggctcgacctccggacaccaccctgggtgcggaagagaggtcgggtcgggaagagatggtgagttcctcagagaggtgtttggtggcgtctatgatcgtgatacggagaggaatcgaaaagtcagtggaaagtcggctagatgaacgtccacgcgcgcgcgagagacgtcgggagtgggtacggtaccgagcactcacttgtcgaatcgacggcgtcgaccttgacgacctctgccccgttctccacccccgtggccgccttgtcaaacgccgtggtcctgacggtgacgatcctgaccctatccttgtctttactcgtggtgacctccaggatggcgtttcccgcgtagatcgggcgtttgaaggtcgtctcctcggcggctccctcggtgtgttgcaggctgatgatatcggcgatcatgctcacgttgagcgcaccggagaggcgggggaagaggtctttgttgacagcggtgtgtgccgagaagaggtgggtggtttcgttggacccatcgaggaactttgtcaggaccggggtgatggctgtaaaggcggcgagttgagcggattagaatttcgggtcgacctgtgttagcacgagaccgccgactcaccttcagcgagaccatgagcatagttgggagaactagcggtgtagatcttgttgaacccttcgatcctggaaacgaggtgatcacagggcgagatcggcgggtgagcatggaggtcgatacccgatcgatgtccccgcgaggcggtgtgtgtgcatacgacccgatcgattcccgacgactcacttcttgacctcttcggtaaccttgttgacctcctcctcggttcctacgatcatggcgttcaagctgcccttgacctgtttggcagcggtgacggcgtggagtacgctatcgttgagttttccatccttgtgctcgatgtagacgagggaggaggcgttccggctggcccgagcgacggacaagagtcgcaaagaagagcttgaagctcgaatcgattgacgagagaggaacatggtgaatggtatgagcggtcgaggtggtaaggagttgtaagaggtgcgatggcaagatcgatttttgtgaactagatgacctactttactttggttgccgctcgttcgctgttccctggttaacgttcaataaccgccaaagtcaggtgaacgcgcgcgaaacgaggagggtggagaggtggaaataataatgacgtaacaacgaagtagactatagagggggtggaaataaaccaccgatggaaccccgctaaaccctatttgcacccaacgagcagttgtaggaccatgctatggttcatgacgacaacaacgtcgactctagtatcgacgctagtacacctccgccgagcgcaagaacagccattcctacacttccgtaccctatggtcatctcgatcctgctccttttgctctgcgccacctcgtcctcgatcgtaagcgggtccagcccttgctcgatcacgtcttcggcttcatgtcccggtgccaacgcagccgtcggtagcgctcttccgcccgatttcttggtcgtagggtatagcctatctagcatggcctccatcatatgcgcaccatccagacgcggtagcggcaagacgttgagaagtgctagggacagggagagagcgaccgcataactgctcgagcgttgcacgctggatgagcccgagagtctcccttcccatccgatcgaccttcgtccactcacttgaagaccagctcgaaccatccgaccacccacctgccgatcgtccctgccctgcctacccacctcgaaaccctgacgacttcccatacttccctcttttccccactccagaggacgaccaccggaccgtcctcctcccttcgtctcccttcccctcggctcaaacctagcttgtcccccaaccccgacccactaggatctctccattggatcctcaagattttctcctccttgaccggccgtacgcacactttggacgccgaggaacagggacatgcccacgttctcgacgtcaataaggggtaggccggtaaacacctcttgacccccatgccgcctccactcttggccccagctccgggtatactcgcattactcggtagactcgtaaactcgaccgagatcccgggggggcacggtgcgggtgtggaagcgaggtaacgtttcttgtcgatacaccatccccgggtctcgtcgaacaggtcgtcccccatgaggtaatccgaccaagtatctcgttccccggagagccgggtatcgtctaggaactcgacgatcgaacctacggggacgtggccgctgagcgccgaacccttcaatcgcgcgcgtgcaaccagttatcagcatgcgtgtgagtaggtcatgacgagcggaactgcagcattcggactgaccgaatcgattcccagtacgacccgtccttgcgccgtgtaatcgtggtagaagatcatcgacatcctggtcgctgcgatcgtcgacaagatggcccatgtcaaaaggttattccaaggtcctgcagcggccattcggagtctcgaggatctgtcatctccgtcagtcgagtgagacgggaccagcggtgacatggtcctgttagactcacgggacgagatcagagaccgtctttgggaaagctaccgaagctgctgggacgatcagatgtaggttcaatgctaaacgtgtgggctcgatcgaatcccttaggtctcgaacatctgtcagctttctggtcgagcatggctgtggcgattgatcgctcgcactcacatggctccagcgatgacatgcccagcctcgtgaatgacctggcagacgagcaaggtccctacgatcggaaagatgtgggaccaaggtaccgtccacccggggatctggagacgcgtgtcatttcagcgttgcccctctacgctatcgaacagcagtggagataagactcaccaaggcttgtacgagatcattccctcgaggctgataaccttcggaagagtccacttcgagcctctgaaacccgtctcccatgcttctcttcgctaatccgtttcctctgattgtcacgtcgtgtctactcgtgacgaccaccttccagactctgatccagctctggcccgcctgaaggcacatcacgcctatggccaatcccatcgtcacgagacacacgggaccggccaatcgggtgtacgagaacaacaaccaagtcctcgcgtgggatttccaactggtccgagtgggtttcttggggaatggggtgaaggggatgagttccggttcgacttccttttccggtagaccagggagagagctcgctgtcaaacgtcggcttatcgagggactggttggacgctccatattggaaggagatgtcggggcaccgaggagagcgataggggcttcgatggatctatcaacagacatgtcatagtgaggcggaaagaagccgtcacgttcagccgcattttcaggctgtgaccatttctcctctggttgatccgttgcgatgtttgcggtagacacaaccgtcttcctttcgtcctcgatcttggtgacagagacatcgactccgacgatccccagcccgacgctacccttgcgttcgccctcttccaacggcgacaccatcccagcgtccagctcgagcgtcgacctgagctctagctcgttctcgaactgcttgcccagccatccgagtgctggagcataagtcgtccagttcgaccatgtaggaatcggccagtaagaaactacgccgtacccgaattcgtcggggttctcgagcatggtcctcttgtacccctgaaaccgcttgctccagcctatcgtcaagctcggtctccgtatcgtgccttccttgttctttcccggcatggacagcgggaagacggcgttcgaaggcaacgtcggattcacccctgcgttcgacatggaccctcttctcctgccggtgacgagggtgacgaggggtgcgagacctcgtgtgaacagccggggacgaaccaggaggacgaggccgataaacgtgatcacaaggaaccctgccaacaagcacctctcctcgaagggagtgagcgcgatgtcgatgtacatactcgacggtgtcagctctgcgtggccaacgtgggtcgtcgaagttcgaggtgatcctgtgagattctagggttgtagtacactagaagctggatgaatcagatgatgtccgacctttgtattgtgccgtggccgaactcgttgtttccgaacttcggaagcaaatttcccgtcaaagttagtccgaaaacggtattcacctcgtcataaagttacccctaatcgtagaaatgacaatactgtatcaagtctgccgtacatgctacatccgattcatttgccccagcgttagatgaaaccgttccatgccaagcatgccatgattcccgagacagtggcgctactgataaagttgacctgattgttcgtcaacacgtcccacccggccaccacttgcagctgcctagcgttcgaccccgatcctgcttgaccatctcgctcgccagtcaagtcgtcatgtgccccttttttcgtggtggggttgtgtaacaagatcctcttggtctcggtattgtagtacgtcctctgcaatgtcgaccccaagacggaatccaacaggctcccacccaacccggccaacccaccgaggacgatccatttgccacaagattcgcccaacctcgtccgtccgtcgagggaccagaagagggcaccgaggcctgctccgccgatgagactcaccccggtccctagggcagagatggcaccgttcgtgcctggaggtacggggcgcagggtcgtcatcaggataggcttggagcgcgagaggatcccaagctgatacgatcggggcgagggaagtgggttcagcaccgactcgactttcgaaaacaacatcaacaacgagatgcttctttgagacgctcacctcggacgaaagtgtatccccgagacacgtcgcaaggtgtcttttgtccacccatcgacgaccgattagcccgcttcctttctttccccatacttgtttcgaacacaaataacctttctcaactcaccctaacgcacccagaaccaagcctttgccccagacttgccaccccatccctgtccctccgttacctgtaaccaaccccctcatccctacccaccctacgaccgccccaatacgttccgaggtgagggtgaaccggtagacgagggaacacaagagggaagggaccgagttgctcatgacttgagaggccgttcggagccccgatgacgaggtcggatgcggggtctcttcgagttgagatttgacgtgtgctttgtactggtcgagcgcgaggagggtcggtttgtcaggtcaatgtcgatgtcgacgtcgacatggagcaaggtagaggtgggtctcactttggtagccaacgttcctagtgcatctattcaaaggggtccgtcttagtccgttcgctctcgaacgaccgagccgcttggttggtagatggacttacagaacgagatcagaccgacgccgaagaccgggttatcgttccccaagtgcaaatacctgtatccatcgataccgccaccgaccacatttcacagatgagccatcgtttcgaatttgacttgcacgctgccttgattgtcgaccagtggtttgtctaacgctcacccgacgagaaaggcgcctacggccccggatgtggagagggaacgtttcttccatccatgggccgccaagagcgtggccagcgtgaaggctttcggatgaaacttgagggcggacgacatgcttgaaaaggtcctggctgggaatgcggatccagccgagtcgtcgccggtggccgtgcttttcgatgccgcaggtcgaacggttgaacgaggtggtcaaaggtgctgacgagtctatagtcctgtacacttgagcttgtctagttgaagttgaattgtaaacaaaccgacaaaaggctcagctcagcgtagagttgagtgcacgaatagcaaatacgttcaggcagtggcacagtcgacgacaaatatggtcgatcaatttccacccgttccccggctaccgccaaatacgaagtctgttctggcagatgccatgacactggggaatttgcgaagatattgtcatggttctgggtctagagacgatagcacgtatcctctgtttgtcgaatcacgtgatctcgtcatcttgttcgttcccatcatcagctggctctccgcaaagactcgacagactagtagaagcaacgacgacaagcatactagaagcgctatcctcttcccccaccagagacttagtctcgactccagagtactagagtagccagtgtggtagtcggtcaaacagggtagaatagctgataagtagctaagtaggaggtgtacactcgtcgtgttggatgatgatgattacgtcattttccactccaacgtcatccaaaatcacaaatagggcggaatggggattcccactgccactcacccagaccctcgcttcagatctcaacaacgtcgtcgtcgtcgttgtcgctccatcctcattcatcgatatcgttctccatctcgtcgaataacacccttgctacaccctgcaaaagttccatcgacaccccgacatcatagaattctcccctcaacactgccaaccggaaacctacaccatgtccgctcaacacaaacacatcatcgacatcctctccaccaaactcatcccgcccctctctaccaagctgcataagggtcaggcgggaaggatcggtgtactcggtggatcaggagagcgagtcccggttaaccaccgatactatttaaaagcctgtcgcaatgttgatatcctctcatgatggtctagttacaccggcgcaccgttcttctcctcgatgggcgctctccgattcgcaagttctcggaaacagccgctgcaatatctccacgttcacaaaagctaaacgtttcgattgttgattacagggcgctgatctcgcgcatgtcatctgtgagcccaaagccggggcggtcatcaagacctactcgcctggtacgttccctcgctgcatcccgactcgacccccccggtcaccactgccgcctccgccttcgcatgaacttgacgatcgaaagctgatcactgttatgcacgtcgttagatttgatcgtccatgggatcttggattcgacgaggagcatggaggatatcaaggcggagatgaaggggatctttgagcgactggtatgtgtcttcttcccccctcttcttcttcccttctcgccgagcttcgactcgtgcttcgaaacatcgcacctctcacgtaccataccaacttgccacccgcagcacgttctcatcatcggtcccggactcggtcgatcggaacatacccagaactgcgcgagggcggcgttcgagctcgccaaggagacggatatcggcgtcgtggtcgatgccgacggtctgttcttggtcgccgtgagtcgcgctttcgatccagaccgggcggatacgggctggatattcgaccccggtggtcctggtcggtctgactgacggtgacgtccgtgacgatagaacgatccctcggtcatcatggattggccgggtactcctcgagtcgtcctgacgcccaacatcatggagtttaagcgattatgtgaaaagatggtcagtacacgttgcgtcacacggctgggaaatcggtccgcgctttcgggatctcacgctcacggctccgatatctgccggtacgtatcagcaaatcgatcccaacgccgatcccgatacactttgccctcgactcgctcgtgctctgcagaacaccaccatcctccaaaaaggcgcctcggacatcgtctcgaacggtctagagctgccttccgccttgctccccgagagtcagcagggcaagaagaacaagccgtccagggagatcttgaagaacgagatcaaaggtgggttgaaacgatgcggtgggcaaggagacattttgagtggaagcgtgggggtgttgttggcttggggttccgaatgggtcaaggggacttatgagtgagtctcgtcggtgcgtctgctcgtcaccgtccatctcacagtcgtcccctcgcacgaccgcgtctacagggaggccggtcaccctgcaccgcccaaagactctcacatcggagaacacctcgcgctcctggccgcctatggcggatcaacgttcaaccgaacatgctcccgtaggacattcgagacgaaaggtcgaagcatgcagacgcaagacatgttgcctctcatttcagacgtctttgtcgaggtctttggtggcgaggacgtcaggagtgacgaggctgccgagtattttcaagacggtggagccgattacattcagtagagatgacgggttgaaagcgaggttgtgagagaagtcgtacgggtgtacaggaaagacactatgtatcacacatgatcgatcgagaatagacgtcacgcgcgaagtcgcaaacctcgttgcacgatgccaagtggcttggttaaatgtttttcgtgatcgtattcaacatgacaaccatttggggtgggagtagaggggacgggcacggagagagtgagatcctgagaggcaggtggataggcggaaatgatggatatagtagtatatagaagaccgggtgcagacatctatatggcgtctagtcggtggtcttgaaggtgatggcctgctcctcgcccattgcggcgatgatggtaacgctgacctccttgccagactcgaaagcggcctcgatgtcggaaccgatctgaccctcggggaccttgacgtcgtccttgggggtaccgtccgggagcatcaagttgaggaaaccctgcggccgaggacgacaggtatgtcagccagagttctaaacgctgttcgtagggccacgaaaccgagcaaaacttacgtcgtcaatgttgatcaaggtgtactcggtcctggagacgttggggacgtccatgttgtgggtcgagggagagatatcctccaacttcttgccggtgaagatctgatcacgttccgcgcgagaaggatcagccaacgttctctttagatgttcggatcggttgatctcgcagactcacgtcgatggcgaccaagttgaccttggcgtgaccgtgctttccagtcttggaggtagacatctgttttttgccgcaacattcatgcgtcaccggtggagatttcgtttttttttgtgtgcgcgcgaattgatagacgtcgataggtcgatgtgaccagatggtaaattcgacaggatgtggtaaatggtccgatcatgtcgagaatgatccggatcgtgtgcaaaatgccggtattcgtttgatgatcccgaaggtgaatggggaaagaggaaaaagatcaattagtcagcgaccgtcctttcattttcaggatgtccgcgtaacccgtcgttccgccccagatctggctaagatgaggtcgtgcaaacaagcccgtatttacgacagccgtaggccatcacctccgagctcatccgcccgacctcgagtcgagctggagctccagcacagtgacagtgcggggcgggacgacgagaaaacaggaacataggtgggtcgaatgggtggagtactcacgtcgacgatcttgcagggcctgcccttgatgcagacgtatccgttctttcggagagcggaacattgcatactgtttcagttccgtcggcgagggagagagagaggagagaaggagagagcgggtgtcagttggttgattgatttgatggatcaactaggggtcggacgatggcttacgggtaggtgagggcggctccggcggctgtagcatagggagaacatgaacaagtgggtgactcgatcagtcactgtcctcatgtgccgacgaactgtgggagcagggtcacgcgaccttgctcccagctggggtcgactcgtggcgaacgtctcgctctcgcataaaagacactcacaggcagactcgaaggtctggtgctcctcctccctctcggcgttcttgacggcgtcagacatttttggttttggttttgtagaaaagggaaagaaaaagagagtctagggggggatagcaagaaacacgagaagaagaacgggcaaaggtccgggcgttgtggacgttcaaaatgtatagatgggaaggtgaacgagtttgaatatggctgggagctggctgtctgtctggctggggtggttccccgcgagcgagtgaaaagaattggagaaaatcaaaactagaagcgcatccgcggcgcacacatacacacacaggcatacacgtagcagtcaccgtcacatcgaataattagaggagaccccgttcatgtcgatcatcacgatcaaacaccttgccatcagttgaacaatcgactgagattttaacagaacggaaggcaaggaaatgtcgaaacgaactcgcctttgtctctcgaattgcacaactctggattggcagaacagcacgtcgaggtcctcgcggtcgacgaagccggccggcccgccccgcgccaaatgtcaatgagaaaggtgtcaggaatccctcatttcgctttctcacgcgttcaacgcaccaaagctattaagatcatgaatatcgtctcaccaatttgcactgcaccggggatatgttccagtggtacgaaacttcattcgcacgattagttcgatatttgaagtaacctgggttcgattcccagtatctccattctttttggcgcagaaactttttttttccgccatgcatcgtgatcgttccccaaccttccgtttttgttagaggatccaggacagtattacaggcacggaatacggttttaaaggacgggtacatctgtcagtagaaccatgttctggctctacaaatcaaggttgagttgatggcggtctccgcagacataccgaacgaccaaccccacggcttggctgagcacttcctttgtcgattcaagggagggattatgatcccttttcaaaaggaagaacggaggaaagtggtccattccataagaaaggtgttacctgaaaagatcaccaattcgcgttgccgcattgaaaggtggacgtgtattctccgagctcgaccagccgtcgttcctgctttccattgtgctttcagcggcggcttaaattctcagattccgttgaacggagagctcagcatcaatggtagggcaagaactacgacagtagtatgagataattcgtcgggagacgacgtataaatggggtgcgaattggtatcgaggatcctgctgacagatatttccgttcagatcgataacccacgccacctccagaacactacccaagcacctgcgcatatcacacagatacagaatgcaacagccagaatctaccatcaattccaagccctctacctccgggccggagggtagcgacatcatccaaagccacgctggctcgaacaccacgaagtccagcatcatctccggcgacgagggactcaggctcgatgcatccacggagaggtcggatcaagtggtcctcgaacgtgctcaaggaagggcggccaatacggattcggatgcacatcaaataccggtcgacgacttggggcaaccgttggattgggagtcgctcgagaggttagccgctgacaacgtgtccctctacacctcgattgcttcgctcgagctccgtggaccgtcgtatcatccggatgagggtcttgccaacgattcggcctgggaacattggttgcagcacaagagcgattttcttgaacagtacgatcgcttgggacctctgttcaaacagttgacttacggacctggtccctgttcgtgatgaaggacagaggtcagttcgaaccactgcctatgttgaggatggctgacgtagccctgcagctcagctctgctattgaagctgcgaagcaaagcttggaccaaatggcagtgtgcactgcccgtttgaaagaaggccccctccgagattacatggcagctcggtctgagagaatggcagccatcttgcagtgtttcgagcacgaagaattcctccctgtcgtccagatgaaaggattgaaaatcatctaccagtcgaacgcggagccgggaggccaaactggttccgatgacgaccaacagccagccaaggaggagactttctctgacgacgagcatgatgccgagtactccattgaaggctttcacgaaggaaacttcaggagttgactagcagtagtctagcgagaccatggcaaaactttaacagagggtttcgtttctcccatttggtgtaaatcgagatatgctgtgttgaatttgaaaccctacgagatcgcgcctcgttagatcatcatgttgtgtgccccagctcctggtttagcgggactccatgtgattctgcgccctccaagacgggtctacatttaccgcttaagtgaaagaggacgtagatgacagtgcgtgctcgcgagttgcgatcggcggaagcgcgagcgcggcgctacttatggtttcagaccctctgaactgatctgttaccgaagtatagtggatcaacacgaatcttgacgtatagtctcacccgccagcatcatttctcacgtcagtaagcgtctcctacacttcccgagtagtagccttgacactgacccatgtacacaaatcggcactccgacagtccacctggtgagttgtggcattttgtcttggacagcccaacactgctcttgtaaccatggatttcctggcaaagttcaatatccgtccttgtaaggttacccgaaggcaatgagtacagccccagttaccggaacagcagaatgtaactgacaaaacgtcattcgctgagtggctgacaggctcagggttttgaaatggtgtcataggcggtccagatacacggagagaagtgtgctgcgcaattgttgaagtagaggtgccaagcatgaccatggcttcaattgtctcgtggctgtactgcctgacgaaattgaccggaaaggaagtaaagcccagcagattgagaggcagcaaactaggagggtgggtgataccgagaaggtgttcgaagccttatcgatggcatcatgcttcttccttttaaggtcgctccgtgatcaagttagccggaggtgggagtccagcggctcctcagcaatcctcgagtcgtcgaaccacgtgcacgaatgtcgatgcatagaacagagcctaaagtgcctttgtctcgccacggaactgggcattcaaggcatacagctttttcaaatttatcgaacgagcggtacacgtgacggtggcgcctcgcttatctgaaaggaggagaaaggtttcaaggtccgaaaaacggctgaagggaaactataaaggctagccaatctgtctgaaaaggagatgcatcgccaggatccttgtggaccaggcaaatcgcttcttctttcaactcaccaaacccagtcgttgtcatcaggtacattttcgatatgtcgggagcgccctcgtctgaggtactcgccaaggactctttgtgtgttgatgaccccagtaaagcaacccagtccggagaagaaagctcccgagcgtgggaccaagaccaatcgtcgaatatatcggagacctcggtttcgactggacggttggtcgactactctaaattaaccaattcttcgcaaccatactatcaccagtcacgttatcattggcagctgtcgattggcagcaaacgtgatgatgcactcccgctgccaatgtttctcgataccctcaagtccctccaaatagggtttactccagaagaatgcaagcattggaggcttcacgcggagcaatttcaaaaggcgatcgaagatttgcgcgacaagattgcggatatctactcactagggttgcggtcctggagagcccacaccggtatgctctcagatagacgcactgcaccaatttcaacattgattgcagctctcagagaagcgacgacggcctactatgaattggcgggatgctccacggtattgaatatcaaagcacctgatgcgtgccaggatatcaacaagagcactggtttcagtgaagccgtcagacagcagactcaaacttgggcttcagtactgggggattttcgagcggcattggtcgacagcttgaagtctgtaggcgtcgagccagagggtcaagctgatttacgggatgcgctggctctgaaaacccctgcaaatctcttaccttctcttcccgcccttcaatttacgttaataagctggagttcagtagaacgtaagggatccgcaaacacacttcagccagaaaaccgtgcagagtcaagattccactattgtacaacctgtgcctttccgatgaccgtagctcttgttcaccatggacgatgtaatttctggttccaaagacgtagcaatctggccttatcgaccgaaatcgcccctctcaggcggttgccggcgagcctcgggtatgaagctattcatcttggggtgaatctagatggggtaaatctaatcaaggaggaccaggatatcgagccatttccccctattttagctgaattacgtgacggatctagcgaatgactgatacatggatgctgaatctactcggttcatttagcttgttcatgtcttggtcagatttcgctgaaacatgatcgaacattttgtgtacgacagtatcgcggtgcacattgactcgccatctatctcgttgctaccttaatttgataactcaaacaggtcccgcctggatctccggtggggctcaaggtggaaatcggtaagcaggttttcaattgaacacgcttgcaaggggaaacttcttaaaacggatagctttcgccttgtgaggaaatgtcgaggaacctaacaaccgtctggaagaaccaggtattctgttcacgctataggtgtcatatcatctcgaggggatgcttgtgaaaagcggattgccaatgacgcgaaacgcactgggtcacccctccctccctctttccgcttcagtacccacgatccagtcgcgttgccatttgcaatccctttcgtactcttcggaatactcacagccatcccgcttacactcaagatgtcaagttaacaagtgtgccctcatgtgctgataatcttgcggaaggcagctcgttcatactccacgtagatttgtgagatgatacgctcaagacggtaggaacgtagacgagcagccatcgcgtgcgctcttgattctagcatactctgccgcccgtgagtaacaaatgataaagggtgtcaacaaactctgctcgatgtaagaaggtgcgttgggaacagctagattttacaacgtgtccgatcgcgtcgaggctgcgctactcataacgaagcggcccgacctccccccttgtggacaggaagatcatggtaatccaagatccatcgcaaagggaagggattcgcgatcgcaggagagccgttctgatccaacatggactcaagtaaactctcagtcgggatatctcgatactacgacgggaaggcttctttcagcttcagatcatgaatccgacgcctgcgaaaaggtcgcagcaggttttccatcggaagaaccatcagcagccatcagcgatctctcgcattacgtcttaaaggcaccgctaatcaatcttgagagtattgaccgcttctggacaattactctggctggccacagcaacgtggttttcgagagcgctgaagataatcgtaccaaacttgaagacactgggccaaacataaacaagaggctctacatgcccttaccggactgatagacgtccttgtggctttcgcaaaaagtacagcaagagaatggaatatggttgctgaaccgagactttattctgggatgaagaactgcagtggtcaacttcagcgcgctggctagctgagcatctcttgaaccagtataacaaggcaatcaaattagcgagtcatatcagagattgcgcgaacgaccctgaagatgagagccagcgagagtgccattcagaggttggcgaggggttcctcgtttttatccagagccactcagactatctcgacgctacaatcgcggcgatgcgaaaatgcgcgctcaaacttggccgcgccgaaggttccaaggacgtctttttgctgatcagccatccgcaagaaccgaaattagagttacgattgaattatgtggcattcgtcacgggtgggggtagccggtcgcaagattgaaacaagcacaggcggttggaactttgtttcctgatgcaaacgatatcaaactcgggcttgttacctgtttgtgtgcggacagtttcaaagcttttggtactctatggaagtgatataccgtatagtgaatcgcaatcagatatgaccatcggtaattgttgcgcatttttcatggcgcgggatagaggctcccaaggtaagatagttgttcaaagaagcgaagctacccataggtcgtcctttgatacaattcaatcatagccaatgctcggtgtcttgtgaccaagacgaaaggggttggacgggtgaaaggaagtctactgggcctgagaagcatataagatcgtgccagcgacaaaaaaacgaggcatcaaatccaagatgtttgacttcgagctttgcagcataaactggaaggagctcgactttctgattgaaaagcaaggaagcatgccaacacactccctactgccaattgaggacgacaacgatcactccactgcactcatgttacaacatgattcatcgtcgattgaaaaatcggcggaccggcccacagctgcaagatcagcttggtctggcaagacagcaccttcttttgagaatgaaaatgatcacaagtctggaaagaccggtccaaccgccacgacgaccgaaggtgtgtctgtagaaagcggttccagcctaccggctgccttctcgaaaactggtgcggagaatctgaccaatgccgagtttgaaaaggctccatcggccacgtacgaaccagtcggtgacacttcggggactacagcctgaacggaaaaccgaggattcgcttcgaagcgatctttcaacggtgaccagcgcaggctggaggtcatggttgacaatcttgcttccgcagttgcaacactcaacaatggctggaaaaaggatccagcagatcagcagaagaaagaaaatttgatcgaaagcctcattcgagagcaaaacaaattcctcgaaaggcggccacgtgccaagactcatgggtctacgcacaaacgtcctctctcgatggataatcccctctcgcagatacgatccacatacagcgaagcccaaaatcctctagccggagacggtacggcgcgcgcacaagggactgaggttttgaaggttgtcgatcgtcaacagcatgatgacccggatgacgcttcgtatgaattgcagcagctggtggccaaactccggaatatacttgttgagcagcaaaccgaataatgatagtcttcccgttggtaggcttctaggcgtgcgccctttcgacggagacgttgggtcgctgactattagtcggatgaaccgacatagcttccgagtccggacatgctgtacggatcccattcatcgtcctgtatcatccccgtcgcattgttatcgaaaacatacatgtcatatctttaatcgcgcaatttttcgccattcggatcgtgatgtcgacacttcgtaaagtgtatcatcccaaatcgtgcgcacgacatcactgactggcgcaatttcgagatttcgaagccttaaggtagagcgaacgagtctcacttgatctaaggatcttcgcttataagcctggtagacacgatcacttagccctcaggacaaccgctgagacctctgaggagaaggtttctcgggtcgacttttggtgacaaactggttgacttcgcaccgcactaaacatgagcgtaactccatggagcacgactacaacctgacgatcgaccaacaagcatgcggagcgtacagcaaaccgagaaggtgagcttctagcaggccgtatctcagcgaatctgaagccgcgggtccgaatcaccaagagtgtggtagccacaaagacgaggtgcgacgaacccctgggggcacttgagaccccgggataaattgcacggactcggcggccacgatgaagacgacaagtcgcgattcatcttctggacgtcctgtccataaggacagaccctttctcgtcgtttgacgtacatacaagctcaaagttcagtctgtcgccacatactactagcgcatacatcaaatccgagtcggtcatcgaaattcccgcaagccactctctttgagaaatcgccgcatcgtaaagtcccgcaggagcgtttcaaatcgtaacgcgtgcccgacccgaatgcggaattcgcttcgatctcgcccgaagacggttgggccatgcgcgatgcgaaacatttgtccactggttgtgcacaatagccggtagacggaacaagccatgtcgcaggtcgcgagtacttgacaagtgtccaaaccctgaacattggtgacccgaaactaaagacgttgacgagcctacagggtgaggtgagagcacctatccacgcgtgacctggctcaggtacgtaagcgagagtgaactcggggctgacgcgcgagaccgaggtcgaactcgatcgaggcgcaatggaggcagggggcctcttcacggatgaaaacgtctttgtacaaaccatacgcagtttccactgaacaacgccagtcctctctttcgccggagagtcggacccctccttggggaccggcctatcgcttctcccccaccctgcattatccttcccccgagtagattgattagaacccattcgaaaggggtcgagggccgctcgcctttttttctgttgacgagattctccctcggctcttccgggagcaggggttttgatggacctcgttgatggatagagggctgagcgcggcgggtggggttgatggagcgtgggtgacgatagttttgaggttttatcttccttggatgtctgattactcgccccctcgaaaccccctttcaacgagactgatatgggatggagaagctgaccaatttgattgtggtctacttaggtttccgagctctcaaggtaagtttttctagtccgctgctctgcctggtagacactgtatctctgtagaaatctcgaatccacgatcgaatgcttgcgatccatatcatatcgcgttctctaccctttgagcgtcttcattggctgcgttgttcataggagcatgcttccgatgagccatctctgcattatatggttacgacgagtcgaaggtttacttcagtatcgtgatcgggtcaaacgtctcttcggacacagtcatctcgagtgccgggctggtacccagaaattgaagcagatcccagccgaaccgtcgatcggatgacacgatcattattacaggcccgcagcagggccttcaatatattgtatgcgagcgaaagggcccgcgccttgcattctacacaggcgacgttctctatacaggcgagcgacccaggtctactcggtctcgcttccggtctcaacctcttcgccctcgtcctcctcgtcctccgtctcgctctcgctctcttctaccacctgcggctttcgcactgatttcctagtcggattccgtcgagaaggctccgcaggctcaacgtccatctgctctccgctcacgtcaaaatcgggttgttcatccgaatcctccgactcttcgtcgctgatgggcgtcatcttcttgcgcgacctcgctccagtggtacgacgtgaaacgccgcgggtcgcactatagacgaaagtcgttgagcttggccacaactcgatcacggctcgtgtctagactcacgttcccgcctgtgaaaccgcgtcgtcatcgtcctcttcgatgtcgctgctgcaatgtcaaggcaaggtatgagccaagagttgatgccatcctgcctcgaatagcactcgcagtccatcgatcacgctccagatcgcttcaaggtcctctacctgacgcagcgcgtcctcatctatcgcttcctctagctgttcaggataatgcttgacgagcgacttttcgaatcgagttagggcatttcgtgaggcagcatctgcaagtgggcgtctctatcaaaaggcgtgagatgtcagcagccgaaacgattcgcaacccatacaataacgaaccgaggcgatattgcgaatcaggacgaccatgccctgcagcgctgccgtttctacctggtctggtagatacaactttgacagtaatgccgttgtcgtctttcgcagttcctctatgttatcccgctcggtcagtcacagccgtccacgcgggcgaatacgacttgcacatactgtcgctgcggatagcaattgttcgaagaagcccctcggccaggtagaaatgaatctgctggtcgaattccacaccttctctctccctgtcacgggtcacgatcccaatcagtctttgttgggtctgccccacgagggaggcccacttacacgaccttggcgggatccgtccagtccaccaacagcagagccatctgattgagcgtcattgcctgatcatctgcatccgtctccctggcttgtgttgccaacatctcgatagttggaaccacgatctgagcgagagtgaatcggtgagcattgcctgggcacctatccatcaaagcgaggacccacctcttgcattctccgttgattcaatggcgatgaatagcagtaaaccgggaagaaatagcttaggcattgccgaagcggcagattggtgaccgtatcgttggacaagaacagtaacacgagttgttgcaggagcttcagggaaacgacaaacagtcaactttggcgtccggcactggcaccggcccgactccggactcacccctgcatcatacagcattccactaaggaggagcttcgcgctaccttctgctgacactgcctggaggccaggaacatcgagtgcgagaatgtggcggactaggccgacgacttgctcgatctattataggctgatgagcacagcacatatccgacctgctcgtctggcatcacttaccggcatcaagtcttgtacaagtgttccaatatcgtgtaccatgagcaggtcaaacaagatctgagccgtcttggttctaaggtcatcgtcaccggcattcagctattagacgacgcggaggtatggcgttagtacatcatgagcgaggacggaagcatccaaccggacttacctgttgcataaacaggatgaaggactccttggccatcctctgtggagatgaccggagcagatgctgaatgactacatagggacctgcatcggggacgtataactcacgacttcaatcatacagcacagcgctaggcagatcagtccctgctccctcagtgcgggctcttctttattccggagcgagggcacaatcaggtcgctgatcacgcccgcaaacacctcgttgtcgcggagggccttttgccatgaacctgtcagctttgcctgacctacgcttatgatggtttacaacttagctcaccccgttgaccctttcgagaaggctcccgcataccaacaggcatcgcatgtcgatggtggcagcttccaacaatgcggccggatcgttcgcctttgctgccagaacactctgccttcgacgatgagtcaatgagcgaaccgatgtggcaaccgatgcagtatcgtcatcgcccatctggtgagaagcttcatcagcctcagaaggcagcggatgacatggcgcaaagtcccgtcattacgtaccatcgacatgcctcgatctctgccttcgtcctctccaagccggatctcggtgactacgtcgacgatcacccggatgagatcacgttcgctgtcagagatgttggccaagatgttcatgcatagcgagatgagcgattccggcaacgatggttgcgaaatcatttcacctgggcgtggggtatgttgtcaacgaaaccagcttgtagtagcaatttcatcgtggattcctagaccacttacgagccagctggaacatcttgcgtcgtccgatttcatccgcataatctagaccgactgctagcttgcacagttcggccaccacaaaagcccgagcgataaagccctctggtaaatcttcttggtcttccaggttacctgcgagtacgccaccgggctgcagagcttcctcgggaagcatattgatgagattgttgaactcgtcctgaatcttgaaggcaaacgaagtgactaccgggaggaccctctccagtcgagcctcgtcctgtacgtttccgtttcagacaagctgcacctggggaggagacagattcagactcaccttgttcgcgagacagtgatccacgaagactcgagccaaaaacgccctttccggagacatgtcgttccagaacgattctggatatcggaattgattcgtcaattgcactgatcccatcgcggccgcggtgatccataccatcaaactgcaaatcgtcgacaagctctctccgggtatcgaatagggataacaatgcatcctcggccgtctgcggattggataggtcgaagcgttccaggaactgcggtgataactagattagggacgtccctactccgctccggtactgaatagatgacttacatcgaccagcttggtgaccgccccaaccgccgtttcctctttgccttcctcaccgatccagccgccaatcattcccgaagcggcgttcctcaccactggctctcggtcgcccaatccattcttgatcaactcttcccgctgtccgatcgtcaagaccctcatatccggcacgttcttattgttgagtatgttgctgtacaggacctttcttagggtagaatcgacgtctcgcgagcgggcgaggatatgttcgatcgtctcgggctgcaaggggaggtggtagagtgctactcggcggacctcggcggcaggatcgaaccgcatcatgtcgagaacgatctccttgagactcggttcatcctcttccagttcttcctcgtcttctcctcccatcaacttggaaagacccaagatggcctgcacgcggatgctcggctccttgtcgttcgctctggctaccaaggtggctcgcagtggctcgtatagatcatcgtcgatctcgccgagactgttgagcaagatcgagagggtctgaacgatccggtaacggacagatttgtctttggcggatgatccagagagaagatgcttggtgagcttgattgtgaaacgagccgaagggccttcggcgatgccatcttcgccagctttagcttcatctacgagatggtcagagcggacatgatgagttcaacgcttctggaatgtgtttgtgcgaatagtcttaccctgttccgtggtgtaggccacgaactttccgacgaaagcgatcacccggtctgcaacggctacgccctttttgacgggtaataccctctcgaggcattccataaacttcgtgttgaaccccttctccccgaccagcatggttcctttaggaccagactctgtgatctctgcgcacttctcctgaatctttctcagcgagaccacgttcttgcggtggttcgacatgttgtgctggacctgtccaaagatgggtgggatgagagcgagatagttgacgaggtcatccgggagcgggacagattcacgagccgtcctcgcgatcgttcgtttggcgaccggcatctttcgacgaatgatagtatgctataaatggtataattgcgattccagaaccagtatggtgtaggtgtagagtcctatcaaggccatctgattcatcatatgaatcacttagaggttcgaacgagatcatgtacggacgtgatttgtttacatttcgagaaacaaaacaaaccctcaacctgacatgtttcacctgatcaccctcacttctagtcagatctctccgatatttcgatagcaaaggaattgatctgatctgatcagaggcacaagtcattgaaggaaacacagaacatgcgcagagaccgcctcagaagaggatagtgatggtcgaaccggtctgatctaccgcgaggccgatgatctcgttgatcgcgtcatatcaggctgtctatacaattatcaccttatcccgctcagtaacctacaaaccgacccattcaatgtcagcgtcgcccgaccattttcataccattgtacagccacattccactcacccttcgggttctgggattgccagttccacagatccgtgcacatcgtctgcaggtccttttcggccttccacccgagttcttgctgagccaacttggggtccgccgtcagatccggtacgtctccgtccctgcgtatcggacgatcgatattagcccaccatccagactgaccctcctttgtcgatcgacctcgcactactcaccttcgaccgacaatttcatactggtagtcgaacccgctcgccttcttcatcgcctcgatcatctgcttgacgctataagccgtccctgtccccaggttgaacgccctgtatttacccttcttgccgacgtccgagtagatgtcgcccttttcgatggcattcaacgcagagacgtgtccctgggcgagatcgacgacatgcaggtagtcacgcacacaagtcccatcgacggtagggaagtcgtcaccaaagaccttgagggggtcgttgactcgaccgacagcgatagcagcgagcaggggcaagaggttgttaggctttccctgagggtcttcaccgatctttcctgaaggatgagctccaccggggctacaagggatacgggtgagagtcagatgccgtcagacctaacggtgcattacggacacgtagactcacttgaagtatcgcaaggagcaaatgttgaagtcgctgtcggctatagcggcgatcgttccccgtgatcgaatttagctgactctactgatttcgaccggctgttcgacgactcacccttggcgaggtccatgaggatgtactcgcagaacaccttggtcttggcataaggactatgaggctggagagggctcgtctcggggataggaattgtcttgggttccccgtatacggtagccgaggacgagtaaacaaagttctgacatccgtgatccttcatcgactgcgtgcgggaaagcaacagacaaggatgatataattggaaaaagctctttcgatggaaggtggggggccggtactcacgtgcaagaggttgagggtacccgatacgttgttctcgtagtactgcaggggtagctcgttcgactcgcccacagctttccatgcctgaccaagttagcgatatcagtcacggcgaagcatcgaacgcaagccagaagaccggatactgactgccaagtggatgacaccccagatctttcccttgctctcgtacgcctcgaaaatcttgtcgatcgatgagcgctcagtcaggtccacctggtacaggtcgatcttggggatctctccgccgaaacgctccttcaagctgtaaatgcccggtggatcgttagtcgagatcgtaaatggggcatgcttgtatttagaagcttaccctggctcttcgttggcgacctcttgtacccgggcgatacaagcctcggctttcgagttgtgaccattgtcgagcacaacggggaggtactttccggtgcgcaataattcgaggaggacgtggctacgtaaaggtcacaagaggcgaaatatcagaccgaatgtcggtgctcgacgtcaaggacaagagggacttatcaatgtagccggcaccgcctggacagagtacacgctgatgtgtatcgaaatcgtccggaatgcacattctctctctcagcttcctgcgagggaatcctccgccggctcagctctggctcggctcaccttgagttcggtggaaggcataattatagtgattcagtggtaggtgctcgattctgcgcaggtagtttttatgaactatgaggtcgatatggcaatgtatctgtcgatacgatcttttcagatatcttgttgcaacgttgcatggtatgtatatagctctggccattttgatgtcgaattccgccgcagaaaggtccgagttgagtgtgagtggggggcgcggggggcaggcgagggaagggcgggatgggacgcgaatcagtcataaccgcgtgacagtcgaccgaagccaggtcgagtgcggtgtgatgcaagtcgcaagtccgctacacatgcgacacatgcgatacacctggcttcctactccaggctacagagcgatccctcgttccactcgaaggctagcacatcaagtctatcaacatccaggtgcaggcacattcggtgctcggacaactcatctttgaggcggattgcgcctcaatgaagaagtagcctgtccatctgctcaacgatagtcacgacgctgccggcatcggcctacggcagcttccgcgccgtccacctttcgacatcttgaccccgctgcttggtggggaattcactcagcatcagtaatctccacaacgaccgtgtggtcgtgggaaatgtccgagagttcatcgctctggatagctagatcactctgaaggaagtgatgttcaggtgcaggatattcaagtcactctgtggtcaagaaagcggtactttctttaaccctatatgcccagagctttcgagcgtccgatacatagaccaggtcgggtgctgcactaccgggtatgacaggccagaatcattgaaagtcattgatgctatggtcgacactgtccgaaatgtttgttgcataccgcattggagccgccttgcgtgctgaagcaccgatcgacggttcccgtgacgtaggcttacagcatgtaatacaagatgacagagtatgcggtctctcaccctgaacgtgtgtgaatagtcaatactctgtgtgaatcatgaataatcaatactctggccgtaaacacgctgtccactctcatacgaacatgactctgtgacctgggaccctgtctcctggccccggcaggcgcaggagatgcccgaggttggatcgtcatattttcatttttgcttccgcccaacttcgagctcgacgttcgggtagctacgatatttcgtcgaaattaccaaaatcccccgttttgacgaggtgtgagctgatatctcttcaatcgcgctcgatagcctcttgatatttcttaaacgatgccaccttttcgtcgaggaggtcctagcaatactcgaggtggtcgaggtgccgcacggggcggagctcgtgcagctcgaggaggtcctcgcctcccctttacattgaccgaggagctaggtctcccgtcccagaagaagagtaagcttcgagggttcgataggacggagtggatgtgctcataattcgttcttcatagaggagtactcgaggccttatgacaagcaggatgagggacgattcgtcaagaaacatcagaaaggatcgagactgcctttcgatagtgccgccaagcgaactgctcaaccggaaagaacaccagaacgaccggtaaaaaagcaaagagctcgtgtggaggaagcaccacgtcaagcttctgtacctgccgagaaggtcgtgacgagccaggacgaaatttacattcccgcaccgcgaacgagtgcatcaggcgagaggaagaagattactgcttccacctcgacggccctctcgcggatgcttgcatcgcaaaaaggaggtaacaaacatgtcgcagccgagtctgaggaggatgttggtagcggaagtgaggaggagcagcccacaggcaagcatgctaccgacatcaaggggaaaaagtcgaaaaaggcgtccgccgtgtctgatgtcccactagacccttccatcatggactcagcgttcggctctggacgagggaaaaaggctgaacgtgacgaagagcaggagattgcttggctggagtggaagttgggaaagaagggtgccaataaacctacagaggatggagatgagagtgatggtctggacggtaaatcgctcgcctccttgtggttgctctttgatgccctggctgatcagcccagtcatgaccctgcacaacgatagacctactcaactttgcggattctttggctcatggtagttcctccaagagtaagggcaagggaaaagaagtcgtctcggcgtttgactcggaggacgaagatatggaacgcttctccgatatggacagccaagatgatgaggggtcgatgatgtcgctcggatcggatgaagacgatacgcaaggcgaagaggatgatatgatgactgaaggggaagatgaggaggatgagaacgatcttgatggttcgataggatcaggagatgaggatgacgacctagctcaattttggaccgagggcgaagatgaagagacggaagacgaagaactcaagcggaataccgagcaaaacgctcgattacccgatactaaatcggcaaccgagacgcctacggtgttgccctcccctgctcctgccgcactcgcatcttcgacgggcagatacgtacctccttccctgagacgcctccaacagcaagcggcagcagagtcgtcgaccacgggcgagactacgacccttcctgcaaagtcgactgagcaacagcccaagtcggagcagcagatcaagttggagcgaaagactcagggattgctgaacaagctcagtgaagcaaacatcgagtcgataatcgccgaggtcgaggggctttatcgggagtggagcaggaacggttagtcgacaatcatctggctccactgacacgggctcaataactgatcgaagaccgccttatacagaggtcacgacgaccttgactgacatgatcatcaagatcatttcggacagggccaatctgctcgactcgtttgtcatcctctatgctactttcgttgcagccttgtacaagcttaagggagcagatttgggtgagtattccgcggtcgtcaggatcatgccagtcgagctgatgcgtgaaacatgatgggcaaccgcaggtggacaattcctgcagacggccgtgaaccgctattcgacgaccaaggacgccgcgatgctgcattccaatcatacgcaagacgaaaccgaatcaccagaagatcccggcaagcaaccgctgaacatcctgacgctcatctcggagctgtacaacttccaggtcgtcagctgtctcttgatctacgacctgatcaaaggatttatcgacgacctaggaactagcgggtccaagggagagtttgctgtcgagggtatactcagggtcctccgatgtgagtccggctcgaggtctttccaggacggatcgctagctgatgcttttatctataggctccggatcgcagttgcgatcagacgacccggccgcactaagagacattgttgcactcgtgcaggacaaggtgtcgggtcaggagaccaagcttaggtgagctggctagtgctgctcttataggcggtcgaacagaagctaaccacgagcccactccacagcgcccgagccaaattcatgatcgagacgttgaccaatatcaagaataacaaggtcaagaacctgcccggtggtcagggacaagtcgctgccgagacgacgaccaagatgaaaaagtttttgggcggtctgagcaggaaacgacaaggtgagcggtgggatccagctttcttgtccggccgaccctccgccctgacactggttggtgttcattagttatggctcacgagcccctccgcgtcaccctgaacgacatcttgacggcctctaccaaaggtaaatggtggatcgtcggagcagcttgggcaggagatccagtgcgagagcgagaacgcgagcgagctcgacaggccgccttgaagcaagctgcggaaggcaaacaatctggcgctcttggggatgggaccaacggagacgaggacgatgaaaccgacctgattggactgggaacgggacaacaggaagaacttttaaagctggcgaggaagcagggaatgaacacggatgtgaggagacaggtgtttatggtcatgatgacaagcgacgtgagtctcggttcgggcgttcaaacctcgagcaatcaatagggactgaattctggtcgatacaccttgtcgattcgctaggactttacgcacgcctgcgatcggctggcgggcttgaagttcaccgaagttcagcagagagaattcatccgggtcgctttacactgtctggctatcgagccgacctacaatccgtactatgccctcctcctttcgcacctcacctcgacatcgtattcccatcggttcacgctgcagtacgcactgtgggacttcctgcgggatctaggacaggacgaggtcggtggtgagggtaccaagggggatgtcaggggcacgagcgggttcgccgggctagatgaaggtaagggaggaaaggctctgggcaaagtcaagcgggtcggaatggggctcggctgggtcgtctcgcaaggaggtatcgacttgaccgtcttcaaggtgagacattacataaaggttctcttgagggtaacacacgtggctgatcgaatttgccaatcacattcccgtcagcccgtcgactttacctctctccaacccgcctcgaaagtgttcttccggacaatgttcagtcacctcgtcctcggcctctatacccgttctccaggtttcaagctgacggctaaacaacgtgctcgacgcgggacgtcggcgttgagcgaggatgaacgggagacgatcgaggccatctttgtaaagaccatctctgctggagggatggagttggcccaggggacgaggtacctcttgacccgcgagatgggggtctcacttcaagactccgggcagggggccaagaggaagaatggcaagcaaaacggtacgggcgtacgtgggaaacggttcgagaggatgatggacgatctcgaggtggacaacgagggggataggggcgtcgtctgtgagggtctcgtcgtcggggaagaggtcttgggcaagatgatgtagtcctgcgatttgatctgtccgatacatgcattcttgtttgcagcgctacatgacgcgcaaaggcgttctcatccagtgtcgatccggtagacctcggcggtgatcccggtctcatcaagcctgtttcagctttcggtgagtgatcgagtcgctcgcagttcgtagcgagtgaatggaccgacgggtggatgctggtgaggcggccgatgagatccgtttcgagatggtattcggtgtccgcgcgtcggtagatctcggccgacgcgggatcgacggggaatcgatcacctgacggccgagatggggcgagaagctcgatgtggcggatgcggattcctcatccagtccccctctgctgccccctccccatgtgcggggctcagcctttgaccattgccagtcagcagtcagctcagggtcgtatggaccactaccactgctatatagttccaccgctcgaccaacatcacatgattccagtcggtctcctaatcacccaagtcgaggatcgtcctgaataatatctacaatcacaaacagcatacagaactcgatcgcactacagacgaacaccgtttctattgacgatctaccgaattacctagtaacatctacatctgcagcgagactgtcgccaggtgagtcgcagtgacgtctgggatgttgtttgcctagatcaacgtctcacacgtttccacatcgactctgccatggcgttgttcattcaccctgcccctgtcgcctgcgtctatcgaaatcctccccgcactcaattatcgaccgtccactcccagccatgcccgacgcacctaagcaaccctccggagcccccgaggctgacaaccctcaccgcactttcgacggccaagacgaggcctcggtacccaccttccccgtccccgagcgaaacctgggcaaggacggttacccggcgcctttcgtccagggcggcctggacgggtggaaagaagagtggaagaagagtgtaggagatcagggtgacgaatggtggagacaggccgccgaggagaacttgtactggcaccgaccgttcaccaccgtccgagccggtgggttcgagaacggtgacacgcagtggttgtgagtctcccggcccttcatttcgcctgcgtcgcgcttcgccatttcccggtccgtgatatatctgacacgtcatcctcgcgctccgtcccggcagtcccgaaggaggcctgaacgtctcgtacaactgtctcgaccgtcacgcctacaagaacccggacaagacggccatcatctacgaagccgacgagcctggtcaggcgagggagatcagctatgccgaactgttgagggagacttgtaggatcgccaacgttctccgcggatggggcgtcaagaagggggataccgtcagtatctacctgcccatgacttggtgagtcgcggtagcgatggtcggggtacccgtctcgtcatccgggtatgaagctcggacggctgatgcgatttcgactgcggatgacaggcacgccgctgcggcctttttggcctgtgcgagaattggagcgattcactcgaccgtctttgccggtttctcggccgagtcgctccgggaccgtgttcaagattgcgaatgtagggttctcatcacctccgagtgagtgcgacgctcgttcgccctgcgtcaggacccgcgcacttacccattgcgcatcactagcgagggaaagcgaggtggcaagacgatcgcgaccaaggccatcgtcgactcggcgctcaaagattgcccgctcgttgaaaaggtcttggtcctccagaggacgggtaacgaggttcccatggaaaagggacgtgatttctggtggcacgaggaagcgcccaaggtcccctcgtactgcgctcccgagatcatgaacagcgaggaccctctcttcatcctctacgtgagtctatctgaagggaagtcgaacgccatacagagctagtatcctgacgatcccgttcccctctccagacttcgggatcgacgggtaaacccaagggtgtcgtccatgccagcggaggttacatcctcggcgcgctgatgaccgtcaagtacgtgtttgatgttcaccctgaagaccgattcgcctgtatggccgacgtcggttggatcaccggacacacgtacattgtgtacggacccctggctttgggtgtgacgacgacgtttttcgaatcgacgccggtctaccctaacgcgggcaggtactgggactttgtcgacgagcacaagatcacccaattctacacggcgcctactgtgagtacgatgtgcgaatgctacgagacgacacaaagctgatccccgtcgactgaacgattacaggccattcgtttgctgcgacgactgggtgaggaacacgtcaagacgcacaacttgtcgaccttgcgagtcattggatccgtcggcgagccgatcaaccccgaggcttggcattggtacaatgacaatgtcggtcgaggcaaggcgacgattgttgatacctactggatgaccgagactggatcgatccacgtcactccgatccccggtgtcacccctaccaaacccggttcggccacgttccccttctttggtgtcgacgtcgatattctcgaccccaacacgggtgccgtcctcgagggcggtgacgttgagggtgtcttggcgtgcaagaagccctggccttcgctcgcgaggaccgtgtacaaggatcacgccaggtacctcgacacgtacatgaagccctacccaggatacttcttctacggagatgccgccgccagggacaatgacgggtacatctggatcaagggtcgggtggacgatgtcatcaacgtttcgggtcaccgaatgagcacggcagaggtcgagtcggccttgttgatgtttagcggagtggccgagaatgcaggtgagtcgacgagctctcgcccagaaagcaatagtggaagaacgatagagctgatccgtgcgacgtgatcacgatagttgtcggaaccgcggacgacctgacgggtcaggctgtccatgcttttgtctgcatgaaggaagagtcggattacagcaaggcaccggagaaggaggccgagctgaaaaaggcactcggaattcaggtcagaaaggtcattggaccgttcgccgcgcccaagaagattgtgagtgccgacggggcctgtgactgtcatgaggtgtcgggagctgacgcgaccgcctcgacgactatatagtacatcgttcgagacttgcccaagactcgatcgggcaagatcgttagacgggctctccgaaagattgtgagttttgcgtgcgattcgattcacatccacgtcgcggctgctgatgaacgttacattgataggcttccggggaaggcgatcagttgggcgacttgtcgacgatcagtgatccttcgatcgtcgagcacattatggaggtcgtcaagaagtcatagggatggcgctcaattcaattggaacctgtttttccctttcctttgcatccatcgttcatgttgtacaaattaagaagcaatatgcaaaagaacacatgatgaccgaattggtacggtaacaagggatacttcgaggcgtatcgcgactaacggcggaaatctgagcgtctgtgatgagccttttgtgcggttagaaggccgggattcaccctcgaatcgtaatcttaatgctaaacgcgttccatcgacgtcccttgagcccggcccatccgcttccagcgaagaagagggacccatgtctcgcgcgatcccccggcttgatttcgtgatttagagctgcatgcggaatcaggttccggaccttgatcgtcgcgagcactctgatcagatcggcacgtggggcgtgagccgggtctcgtgcagcactcgcctgccccctgatcccggatttttttgatggcttatcattctcgcgcgcgagagagcgcgtcccttgggccggccgggagtttcgttcgtttccatgcccctgccctcctcgcgcctgccctcgccgtctcctcgcttgcagctctggaaatcgctgattatacgttttccagttgaacctcgctcggacctgacctaggttgggacgcgaaggttgagtgaacaagttgcaagcagcaatcagggctcacaaagacatctcgcacaagctatctccaccagctggagctcctatcacattgtctggtaacaatttttggtccctactcgctccttaacaacggcgatccttactaatagcaaacagcaggtgagcttgagagcacggccttgatctgactacccctatctaaatctgacatcgatccttcgctttctctgtcgttgacgcttcgatctcatgtcagaacccctcgtcaagatgtcgaaacaaaactttctcctcgcactcgtcctcgtagggatggccaccctcatggtccagaaccacttccactctcgccaactcgccgttgtcaccgaggtcggtctgcaatccgcccaggcccgggacttggctgggatgagctctcaactcgccgtcacgaccccgacgaaaccgcgaacgaagcgtaaactccaaatcatcaaggccggtggtattcccaaggagggtctcggatcgagtctcgggttcatcaccgcgaccgccaacatcgcgaccctgctcgatgccgagctcatcatcacccagacggccgagatgatgggttaccgagtgagcgacatcctcaacaagggcttgcagctcgagggtgctggacgagtgtgtgacatcatggagatcctgttggaggaccccggtaccggtaccttccagggcaggatggaccgcgcccagggtatcctggacaagacgtacgagcgtgccatcaaaaagtgcacgacggtgcctaccgagatcctcttgagtgactacgccatgaaggagatcaacaggtgcgacaccatcatcatcaacgatttccgtaccatctcgcgaggctggaccaagtgttccatggcctggtggaagggggccatcgaccagtacagcccgcccgccgagggtaacgacgtcgccattcacttccgatggggtgatatgtaccacaaggcgttgaccgagaagaaatggatgatggagatggacaaggtcgccaaggtcgtcgagatcatccgatccgaaaagcccaacgtcgtcgtcaacgtctttatgaaaaagtccaaggagaacgagagcgagaacaggatgagggagatcctttcccccctcaagggtcccttcaacattatcgaggccgagaccgatgtcgaggaattgtcgatgatggccaaggccgagtacctgatcatcaactcgggatcctactcgaccggagccgccgcgaccggtgcggccagggtcgtcgtcttcaacggaggtggtgcccaccacaccttgggagcgatgaacttgaccaacctgttcaactaccaggagttggacgaggccaaattgaaggctgccgtcaggggatagtcggaccattgtcacatcctacgctgtcgatcacagatggtatcggaggtagacgggagattgggattggcgggatgatacttgaaaggtcacccctcccagtcgtgtaggacgggattttacgggtcaagtaatagatcgtacatatatagagaacgctttgatgatatacattccgaattctaccttccctgagatgcttcgtcgatgacgatgacagctgttctttaaagttatcgcacgacatcgccatgcgattcttgaaacgcctaccttcctgcgcaatgtcaactttgctagctaaaaatgacctaaagacaagaagtgttcggggattatgagggtaaaacgattctgatcatacggcttgcactttggggaagaggatttgggaaattctggtcactactgcgaaaactcgatcaaggcataaggccagacattaatcactttacaggagctccttcatctttggtttcaagcgattcagcaacagttggaccgatagtgtccgtggtcgtaccagcattgttctcggaataccgatctgagtgtgcagagccatgcccatcgggttcgttgtctggccgtccaacatctcctacgtcttcggtcgtttggtggagaaggcaagttctgtggtaccaggagtaggccgctgcaccgagggctggggtacccaataccacatactatctcgctgttgcttcgaccatgtgttacacacctcttcaggtgcttccccttttggtacctggtttcgtttggctggccatttttccttccgtcctcttcgcttccgccccggccggcccctcgctttgagtacttccttagatgtcacgctgccatcttcgctactctcatcggcgtggtctgcgtcggcctcttcgttctttcccggttgttttcctctcagcatctaagacagatcgttttctgatgtttctacctcatgagttcgaggcgttgagaggcgtggtcgttgccactcatgtacgcagtagagctgagcttttcaatataattgacgaggtggacttcggcaggcttacttctcggtagctgcaaaggaggtcaccgccttgagggtttctgtactggtagtccttgcttgatcttggaccttgatatcctcttgcctgactgcgtctcgatcttcgtggttcactcctttccattgcctccgcttgtagtcgccagcaatagcagtagtcattgcagctcgtgatgctatctaatgaagttccattgttcaccatgcgttggatcttttaccttaatgacgccacgcttccgactagcgccgatgcaagagcggctggatgcccctaagccgagacaggcaaggcatttagacccacggagccgcaaaaggatagatctttgggagtcaaccgagcatttgattgagtatgactgatatatctcgccagctttggatgggcggttgtgttcgcggaaagtctgtaacactagccttactctcacgagattcccgctcagcaacataggcctcaagcgtgtaaaaagtccgaaagcctgaaacaacatagacgaaaatcatgttctggtacatacaccttttccactctgtggcgtataacatgctactgtaagaacatactggctcgctctgctgttctgaagtgctcgtatcgatatgcgcgccggtcctatcagaaataggtagcgaaaagctatgcagctatttagccaatttagccatgtctcgcgtgttccacaacatgacaaaagcgggacacattacagcaaggcaacggtccagaattagtcggaagtgagaagctactatcaaatctgatcgatcagactcaaatgtggttctagtcctcgacagcaatggtcatactggatgaaagaaacgactcgtacgggcatgtgactagcagatcgtcgacgcttccagatacacctaaattgccgaggttacatcgacatcgagccagatcaagcgcgctgtttcaatgtagaaacctcagaggcttgatgcaacgtagacacggagttgttatctgagcatgtagacaccacctcgttctcggaatgatccatcaccctggttcctggtagattagaagcgttcggctcgccagtggatgtcatttcatcgttattcgctgcctctgaaacggagttcttgtctgcacccattcgaaaattgaaatcccccccgttcacgggttccccgaaattcaactccagctctgtcgcgctcgtgggagaagctgcttttgcgagacgatgggctttgtatagcgtcacatccggcgttggtatcatgatgatctcccatcgacctttgtgactaagctcgttgatcatactctcgatagcctgtttactgtggcttgggccgatgttgttgagtttgtgcgtctcgctcatgcgttccggccttcgcattgaggtgtgcctcctacgggcttgcttcggttggtatagtcccatctttgcgattcgatttcggttgcgatttgaatgtgtgaggcaacgagacgacatgtagcagtcggtgcgccgcccttatgagctcgcacgtgcatcagtatatatacatcatatgacagggctacactggagcaggctggtcttgaaagtcctgattgagaacaaaggagatccagtaatatactttacgatatatctattgggttgatcgcctgcccatcgacgacagactcatcatgtcatggttttcgccctgtctctttctcgtcctcctgtctgtatcacgatgggtggtgacaataatatcacgcgagcgattaagtagtcttgagcagcacgctctgtactcccattattgctcatgataccccagtaaggcctaatgccctggagtccatcggggatgtcccgggtctcattgtggcaagcgaaatgaggtgatacgcaagctcgtctgacgccttttgcgcacaaggagtagtacagtcgccgggagaacaatctctttcagccgagatcgggccgcaccgggcgggccatctgcgcatttgtgcgggcaccggctggcgcatttgtactagaccgatgacgtggagatcagattgccagcaatgtgatgtgacggattaccggctcacgctggtccacagctgtgttatggcatttcattcttcgataaacggtccgcctcgactattgttttgtcttccgccagacgacagaggaaatgtcgcgggacgcgacccgccgagcgaacacgtttacaggcctttgatccgggaagcagttgaaaccccatctgttatcagatcctatgatggttcagagtaaacctatgggtaagagcatagggtatcacccaatcagccatgtctgatgcatcccacgaaacgacatggctgaacctccatatcaagcgcgcgaacgccccatccccgctcggttaccaaccgccccagcctgccttgctgcctgtgatctcttgaatttgcttccgaagcctgattcgctcgtcatcgtatcgtccccgctccggcctcaggggttgagagatagctctcgaacggtcagtcacagcgatagatagggatacagtcagtcagggtccatacccttataccctcaccattgcgtatcggtcgattcaatctgtagctcataatcgagaatatataccatcaccctacacacaccttcaaagcataatgtcggaagggaaacagatcacttacgaggacttggaagagttgctcaagaacgacaacaaggtcaaggtcggaggcaagtcgagattcatcgcttcgaagaagcatggcctgctttactcatcttcttcacaatgatccatgtggtcaacaggtgttgatattgacggcgtgattcgagggaaatatgtctcaaaaaagaagtttatgagctcggccaagcccgatgccgactttggattctgttcggtcgtcttgtgagcaacgacgaacccgccctctcggctatgcatggtcatttcacctgacatgaacaatctcgatagcggctgggacatccatgacaccccctacttcaaggaactttccatctcgaaccgggccaacgggtaccaagacattgtcgccaagatcgacctgtctacctaccgtcgtctcccctgggagaacaacgtgcccttcttcctgatctcgttctctcaccctgaagatgggaaacccctgatcgcatgtgccaggagcatattgaacggagtggtaaagcgtttcgaagagggggaacaaaagttggagtgtctcgcaggagccgagttcgaggtgagttctattctggaacgctcagcctggcggaaaggtgtacgactgacccgatgtcggtccggctgcagtacttccaattctccgaaacggcccactctgttgctgaaaagggtcacgttaacctcaacgctttgactcccggtagtgagttcccgcctagatcgtgcatctcgcatcaatccgcggtgaagctgaccgactcatgtgcgcagtgcacggatactcgatgttgaggaccacgatgaacaaggactactttttggagttgttcgatgctgccgaggctttcgggatcgagatcgagggtcaccgtgagtctacacagcagtagccatgatcgtatcactctcaccttgtctacacgacgctcttagacaccgagactgggccgggagtgtacgagaccgctctggcttacaccgaggcgaggaagatggcggacaacgccgtcctgtacaaacttctcgccaaaagcgtcggtattaagtacggcatcatgcccacattcatggctaagccctgggcagccgtaagtgcctatagcttgtcggtaaattcttcgcccatcccatactcattggagaccatctactgccttctagctgccgggttgttccgggcatatccacgtgtctctcaaagatcccaagactggaaagaatatctttgccgtgaccgacgaggaggccaaggctggtgggcgaaaggacgcccagttccaggacaccaggtacctctcggaggttggagagcagttcttggctggaatcatgaccggtctgcccgacagtgagtgccaacgtgttgcggaaaatccgcatagatactgaatctgcaatctgcatcggtagtcatgcccttgctttgccccacaataaactcgtataagcgcttggtcggaggtgaggcattctacgcgccaaacctatgttcgtacggatacgactctcgggtagcttcggtccgaatcctcgcacctcctggagcacccgactatgcgacgaggttcgaagtacgagtacctggtgccgacatgaacgctccgctcgcctttgccgccatctttgctctcggtcactacggtatgcagaacaagctcaagctgccttacggccccattggagcaccaggagtgacgagggaaaatttgcccaaattgcctacatccctcgagaccgccactgagaggttcatggcaaaagacagtatcgctcgaaaggtgctaagcgatgccactgttgaccacatcggaggcacccgactgcacgaagtcgacgttttcaagcagacagtcacggactgggagatggcgcgatacatggagctgatctgaagaggaactcggtagctaaacccgttgtggtcgcgtgtctatcgtctgattgcatacaatgcctcaagctttgctagcgggaattatgcggctgtccttgatagtggaaccgggcatggtcaacacctcggcaccggtctcggtgatgctgcggcgaggagtgatctcattgtttagcggacgttcgttttcgctgtattacactcggcattgggcacttacaggatggtctcctcgaattgggcactcttcttgccgtcttttgttacggcagtccaatcactgagcgtagcagtaattgagcgatggacttggtcgaaactggctcttgtctcgagacttactccctccagtgatcaagtccagcgactcctccgttgatcatgggttctatggtgaagatctgaccggcctccattttgccgggagtcttcgaccctccatagtgtacagggtaaggtgcacaatggaactgcaaatgagaacatgaaggtcagctattaaggtccagattgattgctatatattaaggaaacataccagctggttgataccgtgagcggtgtattgtcgtacgattccgtaaccctttggcttgacaatcgactcaatcttgttgccgatgtctctgtacagtacaccgggcttgcacatggcgatggcgctctcggtagcttccctcgtagtggcgataagctcggcatcctcgtcgctgacctttccgacagggtaagttgcgttgacgtctccatggaaacctgtcaagtggaacgaagtgaacatcttgccagcctctccttggttataatttgctgacctccatgatctgcatgcattcgagttcagcggcattcaacatctctcacgataccgattaagacttacacagcgaaacatccaggttgacaatatctccctcaactgtgagtaaagaccgatcaatcgacgagacttgagctagatgacattgtttacgacatacccagaggcctctggtcggggattccctggtcaagacaatcgacagccgtcgcttagcaaacatatggcgctgctcatcaaccaattagcactcacgtgacaaatcacttcatttaccgagctggttcgacagttacatcagcaaagccgagatgaaatgcgagcttcaagcgggcacttacatgcaaacactcttggggaaacatcggtaattcaagggactggggtaactatcccgcttgatgcattcttcatgacagattgcgtcgagctcgtcacttgtcacgccgggcctgatgtgggcagcggtagcatccaatacttctcgggttagctgtatcggttagaataggtcaactctgatctggggaacgacaaggtcggattgagtgcttactcgacagacttttcgcatggcttcgatctccgtgctgttcaagactcggttgcggtgagcacctcgcgcttcactcaaacattcgcctcgagctgtatggcggtgagctttattggttgcggtcttgcttttacggcgaatgctcgctgcttacggtgatcggcatagtctggtcgaacgatgtgatccggcaccactcgcttggcactcagggggtatttgggccgtgtaggtcctgtccacttgaagcctgacatcgacatcgggactcccttggctgcaggcgaacatcagcgtcttacaaagggagagcaagcggctcatcggactgaccgtcgactcctgcgctgacggccgaggcgttggcagcggccaatgactgcatgaaagcatggacttgcttatgtgtgccctgaagatgatgcaaaacagtgtcagaccatgagaagctccggaacgttttccgattgagctgcacatacccctgtgcgaaaaagatttatagctattagcacgatgcttatccgcagttccgaaaccaaacaatttatcctcacagttctttttgaaacagtcctgctcgcagaagaaagagcccgggatcccaagtctgtcgagcgagaacgtcatcagcgtcgatgtatgcctaaccaagtcccgcagaggagctatttacttcttacaggtcgggcactccaaccgcgacgcctccttgtctttgcagccgatacatttggtcatctcgaaagtctattattgcaaagccccttgaattttatgaggtgcactagagcctagcgttgtctttgatctttgacgtcgtattcaagctgcaagctgcaagagatgatcgtttgggctcgacaatcgacgagctcggattttcaagactctgtgaccggaaagcttccggatgccgagaatgatgttttccggatgcaaatacccttgagcagcagatacaccacctctaacagcagagcctttgtgttcgcttcgagagcactacttagacaagctcccacttgcaacttatctgcatgctcatatgcatgcaggtgacacaggtcgtagcctgcagtcggtcattaccggcaaggcgatcactaagtgacacgccgcagcgccggtgattcctgccagacgtgcacttttccaccttctacccccggtagaaccagcagcgatagtactcttgccagacatgcgcacaatgctacgacaagtttcttgctgttgcctgccctcacacgtaaggaagatggcacaactaaggtagtcgctacgtagtcgactcatggtcgacggctttgggcagcgtcggcagctgtcttgtcgcgctcgtaaggtcgtatatctgatcccgtctgccagtttccggcggtccccgtcaatcagctgtgcaaccattttgcagatcagctcagatcacaaatttcgacatcggtgtctcaatgctgaagattgtggatgtgaggacaggcagagcgcgaagtggtcttgcgtgcgtttcagatagagtcgaatgtcgctccgggaccttgcagctgatcggggcgaagcccaggatcaattcgctttacccatggaagcttcgacgagcgatgcaagctcgagcagaacgcccatcggcgctcccgataccgaaggaagggagacatcgtataccaaggagtcaagggtccaagatctccagaacgaaatgcacgatccgagatcgaaggagatggatttccaggatgccgagacggttgatccgtacgatccactcaagcgacatcttccggtcttgcttcggcctgcaaaagagagctcccaggaaggtgttgaagcaggatggatgccggaccaaaaaatggcgtcactctggatgggtgtcttctacgacgtaagccgtccgaatggtcgctccgacttcagaaactagcttgctcacaggcagtcgcgcagcttgcattcgtagctacgcttacggccttcaccgaagttcacgcaataggcgactggacgaccctgttgaactttttcggatttttcgtgcttctatggtggagttggttcgcccaagtcaattatgacatccatttcgagacggaagatctcgcacaccgttttttcaagctacttcagctgtgcggactcgggtatctcgcaggagcgaccggaggatgggatctcagtaaagtaagcagacaggaatggcttcctgatgtgcattgattttgcgctgagacgaactctataaagattcaacaatccgatgacgtgttcgcagacggagccggagatcgatatcaagcacatacgagctttgtcacggtggcttcggcttatgccggtctgagatccattctcatcgtgcaatacattctaggttcgtccaggctgcgccaaatcaggcttactgaaagttcaagcaatgctaataattgtcgtctgtcagtctactttctggcaagaaaaagacgtcagccgtatttgaaacgtactttcttgactcccatcgcatataatgcagcatcctgcatcgtcgtcatcctcgcggcaaccctcaactctcattcgcaagcgctggtggccgcgaagatcacctgtcttttcctgtcggtgacgttcgaagtgataggtatcttgatcacttccgttcaggcaagaggagtgtaagtcttgactgtgaactctctcggtttcggaccacctaaatccgttggatatggtttccttgcagtggcgtgcaaagtgccagactggccgaacggcttggtaatctcacgttgatcgtactgtaagtgcgaatctgcttgagaagtcaatctagctcatcgatgtgatctaaaataggggcgagggtttcctcggcgtatttaaagggttcaatcgagccatcttgggtttcagtaaggacaatattgacgtttatatgtgagcatcgcaattgagcactagaagacattcgagctgaaattttgttcgttctgtagatctgtcttctgctgcatcatcatcttgtgctgtctctatgacttttgcttcacgggcttcgaggtagagcttcgtatgagcaagaggagattatcggcctgggccattttgcatttccccttgcatttttgtctattcgctttcttgtctgggttgacggttcgtcgctttgtccttcggcagttgtattagtaccactgacgatatgctcacagaatgccacagtagcctcggcttttatcgaaggagctctctatggtcaagcgagctttctggtcccagctgcagcagctgctgcgggaaacacaagtgtattccgagagctggctcaggatcagaatcttatcctacaaatctcgtcactcaagttaacgccatcttatcgagaagagctggatcttttggacaatagtacggggatcaacttgggcaagtccgacaactatggatgggaaacgctcagctaaatcttgttctactgctttgttgtagaggttcaggtcgcgcaatacgccagccagatcctcttcagatccgccgatgtaagtttcgtcggcaacttttcattattgcgcagttcccgacctcgactcggtagatatacgttcctggtgacagtagtcaagtcttccaggacacatactcgcagctgcaactaatcgaaactgatgccacgaccaacgcaacgttatcgaacgagcgggccacgcttgccggtaacctttatctgaagctatggacgatcttagtgacacagcagtaccagggtattggttggtgagcatgccgcacagcatacgcatcgtcaaaaaacattcattagaccgctcaatttcgtctttccaggatctttccgtcggcggtgaatcctggtgtaacactgtgaccgatgcactaggctcaaatttaaatttgtttggtcaggggctagtcttgatattgatatccatccggaacataacgcattgccactggcgtcccggtaggcagacgaagcgacgagctttgctcctcatcaactgatggcagctttaagcatacaggcccaatgttgagactacttgaatactcgcagttgacagtcggctttgcgttgggcatattggggctactcaatatcgggaaaagtaccgtagacttcgcggacaatatcgacggcaatttcgatagggtctcccctatatacgtattgatatcctatgactggttgattccaatcatcaccattgtctatttcgtactcatggccgtgcacaaggtcagccattctccgatccgccctgagggaatttgttttttcaagctgacgatcaatgtgattctgcaggttatcctagcattgcgcaagaggcgtctgcaaaggtcgctacgctaggcgatgcgtgctaagccatcgaaaacagcgtcgtacgcgtgatgctgaacccaatgatatatatactccaaagcgattgtacaggtgtacccatcatctagcgtgtgtctgtcaccgctagtttcactggctgagctcttgccaaaccgtgctgctgtaaattatatgctgttgtatctttcacgatgtgtgcgacttgacatgccgttcgaattcctatgaatttggggaaaattagacaaaagtattcttcgggagatatgctcgggtctagggtcgtacctctgaagtcgcaagcaaggccgagcattgcgtctcgataccgtcccccaacttccacttgcaacggtaaacctgacctagagggccgtctcctcgagaccgactgtttgagccggatcgagacgttgacgagctttgcggcaccctcttggccctttttttcaccggtatgagcacgttgatggcggattcagcggcttgcacgctgacggtgatgaccgggctttctgctgcatcgccattctttggaatgtgggctacgcactgcctctgccatgcctcttcgccaagttccgccgaaagaatgcgctgcatttctgagaggtatcgggtacttgcagtcactgcatacaacatcgagccaaagtcgtgctcgagcaatgccctcacgagccgtgcgacaatcttcgtcttgatcccggtagaaccgttgagtcgcatctcgagtgccttgatgtcttcggcttgcgcttgcaacggagtagctggatagacacccaatccgaggaaacccgtttgatcgcccgggtagcagtcttgtcgcgccgacaaagtctcccagaactcagcgggtttgaacttgtcaagcgataatgccgcttcatgcttcaatttcgcttcgtcctccttgcgcttctgctgtacagccttgacagtgatttcgacggcgttctggggcgtgttggatgtcccctcgcgcctgagagtcgcctgggctttacttgacgcgttaatgactaactcatccagataccgaccctttgggtcgtcttcgaatcgtggaaccaggcacgcaagcttcctcgcttcgacgtcggcttgatctgggtaaagaggcgtcttttcgaaagggccgaatggcggtccaaacgaccacgtaaaccgctcagcgccaggtacgcgcgacggccctatctcgttctttgcctgtaccgggtcgatacctgggagccaacaattgagcaaaagctcctcgggtggaacaggtatcacatcatctttctgctcgagctcgacctccataaccgccttttcgaaaactgttttccaccacttgcagagacctagaccagtgagaaccttcttcgtgccgccctcgctcgaatttgcaaacaggtattgtttctgtgctcgagcgaataagcggcagtagacccgcggtgtgggtctagtccgtggggagatgtaatatttgatgaaggacgtcattagaatgcttgtgagagcgggagccttcaagccaggttggagaacagagtacccggaagagtccaccttggatatgtatacgactgtcgagagtgttgccggaatcgtaaagacgtacgcttccaaagctgataccatgatggacgtagcccctacaccgacttgcgcggcttggcctgtgactgtaacgagtattcgactctcccacgttttgtgctgatcgtaggcataaggaaataggctggcggcgtttgaaagtttcttggtttgcgattgaacgacatctatccgcacatcgaaaggcagagaactacgagcgaaagcttgctccaaacataggaggaggctgagctgaggctgtgtcggacgtccgactacggatctggtgctctctccagaaacggcggtcggtccgggttcgagttgctctggcaaacgaccgagggatgatatcggctgtgtggtaggtgcatcggcggtgctgtcgccctccgaaattgtcttcttgggtccaggtagggtgtaccccagagcgactagatcgctaggccgagggtattgtacgagatcctcctcgtccgaacccgaatcgacatccgattcatctgaaggatcgcatagatccagctgcctctgaaggcgcgagatctccttgtttgctttcctcaagtcagactgcgcatctgcgacctttccacgctctttccggacggtctcagcaagcttgtaatgttcgcgctgcaaattcgggtactgcgccgctcgatgccggatcgcgtcacctgtagaacgattttgctcaagcagaaaggctagcttgtgctttagttgggtgttctcatcgtccaagcgttcaacttcagcctgaaaatgaagtttctgttgtttcaagccaaggtccaattgacctctgagtagcgaaagcttgtcctcgagtttggcgttctccctagccagctcgaccgctcggtcgctcgcccggctgtacaggtcctggtgaagctgaaggtcttctcctgcggatttcagcgaatctttcaggctttcgatcgtctgataagatagagagcatttttgttccaggtccgtgtttgcacgctctagcctaccgactgcgatggcttgaacatcccgcaaatttgtcatttcttgcaagtccctgactgcggtttgagccatattcctgaagatctcgacatctggatgagcggtagaggacgtgtcaaggggtcgttcttctgcagcgagacctcgttcaggtgacgcgcgagctgagccagtaggtcgatttgagtaagaagaatgcgtagaaacctggaatcggactgaccttgcacagtgggtctacctgagccatcctgtgccagggccgcggcggggggagcgggagttttgacagttttgacaggaagcttcgcggtacccttgaaagccgagtagtgtaacaagacagtcagcgatggatacttcgcatgaacagttatgtgcaacacatacagcatcttctaacccggtagcaagagcagttcttggccgggcagacccgatagaggtgtctggcgtcggtcgttccgcagctgtgccatttaccccgaacacgtcactgtcatctttttcctgggcaatcgtctgaacattcacgtcttgagctttcttgcgcatcggaatcgggctcctgttcggactcgagaattggtctatggactcttgtgtgaaagtgaaatcatgcacgacggtagtagtggtggcgcttcgcaagatcgatgggctgaagtgcgccaacggccgcatgaccgatcgctcgggagtcgatctgcgcgaattccgagctacgcgcgcgggatcaggcccctcaacttgccgtacaggtggcggtggtgatctatcttctgttgagcctggatcaggtcccaaggtgatgacaggtgaagcgatctcggcggctgcatcggttatggtcgtcgtgaccgtcatttgaccctgagatgcgtcctcctcctcctcatagccatgttgagccatcatgttcacagcggtcttgaatagctctgcctgcgaagcagtcaaatctgcgtcgagggaggaatcgatcgagacgtccgccgcttctgacatttggatctccatcccgccacgaggactggggggggtggccattgtggaattttcgcggtcttccggctgatcagttacgccagtctccctactagattcgagaccgggcgtctcaggttggctaacagcttcgtcggaaatagtagcatgagcagcttgagaaacagcatcgacgacttccgctgccgacggtgcaacttctgacccgttctgtgtagcttctgaaacttccggcgagggcgtagccgggccttcccgcccgggcgggggatcgacgggtgtgtcaggagatctagacgattccctctgctgactcggctgcgatggatcgaccgtggagattgtacccgggacgactgaatcgttggattcttgcgtctctgcaaaaacgacacgtttggactgcttcaggttgacggggttgatctcctttggcgtctctgctcgacctggcgcatctgtgtcgcttagttcctgcatcggcccggattccaagacgataacggaatcgtcagaaggtgatgattcggatggtacgccagtgcccggatcctctgcgtcttcaaccgggtcggccgggtcttctcccattggaacttcactcaacatccggccctcgtcgctgtcgatcgcagattcgccgctaaagatctgctccatcagggatggggcagtcgcctgcctcggacggactgaagagtttccatataccttgacacgacctcgatttgagcctctctttcgactcgctgccgacgccagaggctggttctgcctgaccggctgtttgccctttgcacgggaaacctttgcctgagctgaatgatcatccgagaccgaggtggcctcatcatcggtcccacccgcacgcttttcgataacgacttccggtgtttggtctctcttagcagtcgaattcgtttcttgattcgaagtagtagcagcgggtgctctggacttggctggcgatggattcgaagtctcgtttgaggccagcgtgacgatagggtcatcgcggtcgatcccgagggctcgtcgtttgttggtggggactttctctggtgagactgtgtacgaaaagaggaccgtgtctcactcagcagtactcgcaagggattcattctgtcgtacagcactcacgagaagagtcgctcccaacacctgcaatcgacccgctctctacggtttgcagcccgctctttcttcgcacagaggtcgtaacctcggtcaacacatcaccagtaggttcactccgctttctctttgatcctcccgctgatgccacagaaccagctctcgatgtactcttcctcccactcttgcgcttggaggcagcggcagccttggcctgccttttcctctcttcctcttccttctgccatcgaccgacgatctcgggatcagccgctttcttctccttccagtcactgatgagctcgttggtgcagtccgtctttttctgccacgttggtccccatggtttgccagtctcgggatcttcccccacccagtcgaccagaaactctccaaaagactttcctcgaagcgtcctcacacgttcgtccaagatggtcctggcttcatagaggacagccgaatcgtcagagcccgcctcgaattgggtggccggctgagtctcgtcttctgatggattgtccatgatgatcatcaatgtagttgcaagaagaccggccgggttgtatctcgagacgtgtgtagcggactggcccgcagacacagctcacgagggtggccggggtaacgagtgcaagatgatgagaatgtaacgtagatgatgtatatgtatatgtggacatcgatgtggatctggatgtcgacgaatctatgacaatctcaaatgatgctcgaacatgtacgtccaacgcccattacacctcgtccatcatgcttttctgtgtgtcttagcaagtctagatctgcgcgttttgctagatcgagccttgaatttaaccgatcctagcgaagacccggatacgacgacggttgacgagaaacgtcgacgtttcacaaggcacaaaaggatcatcacgattgcaacagagaattcgacaattatacatgtggatgcgagaaactaggcgacgagcggtaaacccttttcgagggtctcgacgtcgaatttctgatcttgcgcgacatttcgaagagccgtgagcgctttgccttgctccttgaagatctgcgtggatagaagagaacagtcagctaccgaacttgtatcgaactggctgatgtcacgtaccctgagtagatcttgctcggactcgaaactccaatcaaatttgccgttgttcgtgtacccattgtccactacctgtttcaatcgcaaaatgcacgcccagaactctgctagtttcccctccatcctcccaccgttcccggtgacttcgtacgccctcaacacttcctttaacaacctgtacgtttcctcctcctgcctcgtcaagtccgaccccttgatgtttcggacgagaacagcgaaatcggcgacgtatttgatgagcatggagaagatgctagcggtctgagcagccagcttgtcttgcgtcaacgagaggttctgtgtgatctctctgtaggcagcattgagttgaccttgcagagcctgaaaattggtcaatcggaaatcagtcaaagaacttggcggcgggcaattcttggaaagatggacttgcatcaaagtaagtcctttgatctccttgatgcttgatttgagtctccaccctctgcttcatcgcctcgtatcccttcatctgaattggcaagagactgcgacgggaagggtaaaccaggtcaggggcggaataaggcaatcccaaaggatcgctgccagactcacccgctcctgtagggattttgtcgctgagcctcctcaaacagctgcttgctgatgtattggtcgccgggccattgatgctcttgtccgttgggagcagcagcagcatagtatacgtaagactgttgtatcatgatgtcagaccatcgcaaacgtatagtcggaatgcctgaaccaagctcactcgtagttcagttgcagacgggtcgatcactccagaagcgatcttctgcagcctttcctgcagcgtcctcttcttgggtacggacgatcccgatacactggcaaagagactggacttgttccggttgctcgacggaccgagaattcctagtgtggagctgctcagggtggactgctgcagggtctgatgctgttgcggctgctgctgctgttgttgttgctgttgctgctgttgctgagattgttgttgcccgaagagcgaggtctggaatttcacacatacagtgagcgatcttccgacctcggcgagattctttgagacctactgaattgttccccaaagcactcccaaacagtcctcccgattgctgcggctgttggttctgctgagcagcaggggctccgaacaacgaagtcgtaggttgagcaggctgctgtgcacttccaaacagcccactcccagttccagtagcaggtacagcgggcttagtgccaaacagtcctcctcccgtgctttgacccagaccgcctgtgctggtgccaaataagctactaccagtaccggtagcgggctgattgttttgtgtcgatgcacctccgaagctaaagctgctcgaagccgccggctgggcgggaggtccgccgaaagaaaaggacatctggggtcaaagatactgagagccggatagtgctagaggtcagacggttgtgtgatcaacgattgagggtttgtgatgtttagaatagttgggctagttgtttgaaggtagtcagttcaacatgtctctggatctccttcgtcagactttccccggcgcgcgtctcttggacgcggagctggtaacaagactcgtcacaaaggtattttggctacaacgcttcgtgagtgaacccacacgagcgacgatacatatgtcaagtgtgactttctctttctaattacctctcggaacaagctttgcttgcccaatctcgtaaatcatgagctgacgcagctctttcatgtcggcctgcttgaattcccaggccccgcccgatgaggcgtcgtctccatctccaagccctcgcgcacgatgctccaatgtctggcaactaaaaacaccacaatcccatccgttgttttgttgtggtgatttctgttagttagtcaagcaagatttagcgagatgtccttaatcacgattgatcttcgagagaggcataccgcatcgcagtaatctacccaatcgctcaaatctatgggtgtctttttcttgtccaggtgctcggccgcgacgtatcttctcagtcgctgttggaagcaacgatgagggggaagatcaggatcgctgtgcggcgcggacagcacaatctcgtaagcttgaacctacctcgtaaacttcttgatgcccattggggttcatagagtcgtaacattcgaatcgtttgtctttgaagttgatggcgccgcatagccagtggacattgcccttgttgatgggaaagacgatgatgtcttttgagaagatatcaatctggaccgacatcagaaattccgtaagcgacatttatgatgaaaccgcctgcgcaagggactgtacctttttcgtccaacgaccgattctggatttagcgtaatcgtctcccaattttgcgtaaaagaaactgttgaaacagtgaatatcccgccttttcttcttttttccatccacctctatgagatcgttatcggcccgctcttgtagcatagccatgtaaaagttgatcacttcatcgttcagccactggccaggattgagcaggcgaaggtctttcatttcgacctgttcccgaatacatttgctgatgaaccggggattcttgagcgcagtcgcgatcttgtggaatggtactcgtcgtcagattatgcttgaccgccgcttcaccgacgtcagaactcacagtctttctcatttcgtcagtgattgtgggaacaggagcgacctttggaagcgcaactcgtcgcaggttttcttgtatcttttcttcagcttcccgctcctgcttcaagaaggcttccagggttttcaaatcgaagggatcctttttgggtctacatgtcaggcatgtcagatcatactggttagaatgcctttaacacaaggacttacggggccttgattctacccagaagtgccgctagatccctcctagagcttttctacaaggtagccatataatcagctcatgtttgtgtgctatcaggacgaccatgagcacgcacttcgataggcacctccttcttcatgccacttcttctcgtgctggtcaacgaagatgtgctacctatgtaggatacggtgcggctaagtgaacgagcatatggacgcagataccgctatgaagcagtctcacctgaactctccgctacgttgaatccaatgtctgcaaacttcttggtcaactcatccgccttgctcgtcttgcgttgcttggcaactccgtcgacctgcttctgagacgtccgtacgctgctgagactggaggcgtggtctctcagttccggcctcttgctgatcggcgttgggctagaaggtccagcatccaatatctcctggtatgcgttcctatccaaaccaaactttggctcgggattcgcagtgctgaccgattctgctcgacagacattcgccataagctcgtctcgcttggaagcgtgtttcgaataccgggcttactactaacgagctgcctaatcttggcggccgaataacgacctcttggacgatgtcccacagtatgctgcttgagaccatggtcaaaagcttgatgtacccgaattcccgtaggtataaagttagaagatctgcttgggttaaatgtattcgttgtcgagctcccattttgacggtcgacagtactcggcccaggttttgttctggagctggggctggggctgggcgactcggacaagccggtcaaatcaatgaccgggccttcctgttgacccgccgcttctcggtccacattctcctcctcgagccccgcttcgaaagcctgattcatcctcagcttcgctgcttcgatggcaggcattgtaggcccctgcaatgatcgtgcttcaggcagtctacgaactccggcaggaagatctggtgagaagctatcgacgacaggtgggttcgacgaagtagctgctgcggctggtggtccggctgcgcaattccatgacttgtggtcagatgataggaccttgaactcgaaccgaggttaaaatccactcacccgtctcggcgaaaccgagcagactcttggttaagccccaagtcttctcaacgagccagagtcccggtaggaaatgagccggttcgtaatcttgctcggcctgtgatgagcggactctctgcctcttggtatctctgccttccgttgcggatgatggatggtttgcggcagactgtgaccatcccgagccgcaatcgtctggtgtagggcgtttcccttgtcggttgatggcactcatgggtatgcctaccgcataagcaccgtctcagcaacgggctcgacggggtacaaggagacgcctttcttcaagcacaaaggaagcttgctaagactgttgaagtgggagtgggttcagacgactgtctcacaagtgacgtgttgcttcctgtttgatatacctcgagcatgcacaaagttaaacatggacgacgtgaactaggaagccatgaccggggatcaccagtcctgagattcatcgcgcgcttgcgaaatcgaaatgcgacgagagatgaatgctaggtgatatgatatggtctcgagaaagagaattgacaaaagacaaaaacggtcgctacaggtttgccctgcgtgtgtacaacgaatggaatggcgtgggtttgattatgtgaggccctcttgatgttcgtcttgttgaatcgcccagcaccttggtgctgcgtcaattattgttgtctacagctcgagggtatattcactccccgcttatcccgaatcaaaatatgccaatatgcccaatgcgatcgtaccagtgaatatgccgagagaactgtcgcccacttatccagtgtaacggagtttactttttccgagtggtcgggagtttcctgatcttgcgaccgcccgcggcgtcccccgctccgacagaaaaggcgggcgatccttgcctagagtcgggcccagcagggaacgcagggccagaaccgcctacgttgaaactgaaaccggtgttcgctgtacctggagttccaagtgtgcccggcgtagacccaaacattcccggttgaggcccactgttgcctccaaatcccgtcgacgcgccaccgaacatgggggcggacgccgagactgcgggttgtgcgggatttccgaaaccgccaaagccagtaggtgcagcgggcgttgcagcagcagcaggttgaccaaacggacttgccgtagcgggctgtccgaaccctccgaagcttggtgtcgacgtgccactcgcagcaccgttcgaggccgacccaaacatgccgctctgagcaggtgcacccgcgccgaatacgttgttgggcggtgctgcggtgggtgtggctggtcctgtggtagctccgaacggggaggtcgctgccggggatgcgccgaacgtgaaaggtgcaggagaagacgaagctttgttgtcattgctgccaaagctgaaaggcggcgccgagctcgagctcgaaccaaagttgaaaccaccgggtccgggggcgggtgtcgacggtttgctcgcagcggcaccaaagggattcgaaggcacggcgggtgtcgaagaagcggcgtttggcaatccaaacatgtttgtcgggttcgaagccttgacttcctctttgggcatctccttcggtgcagatgctccgaacgcgaaaggtgccggcgcggcaggcgttgcggcactgctcgtcgatttaccgaaatcaaaagaagtgttcgccgcaggggacgagctactgaacgtaaacggagccggagccgagtttgtgcttgccgggacgggagtggtcggcttgacgcccccaaacaaggggttcgacggcgtctctgtaggcttctgcgatccgaaaagacctcctgccggggtagaagcgggagcggctggctggcttgcgccgaacgtaaatggtgtcggtgcagcaggcttgtccaccgacttgccttgagcttcaggcaggactgcaaccgactctgtgaccggcgcggagctaccggcagtagggacggctgcagatgaaccgaacaaactggggaggggcttgggcgcggtaaagttgaatccactagaaacgggggcagcggaaggggcactgcagaggggagccggtcagatcagctactcttctcgtctcagatgcacaaggcaatacttacacgcttgacgtattactgaagaatgatggaggagcaggcgtagcagacgtcttttcaacgaccttgggctcaagtggggcaggagcaggcttggcgaaaaagtcctgtaagcgaaaaggttagaagacgccaaggtgatgaggaatataccgctcgagactcactggcacggcaggtttgggggcattcgcggtatccgaaggggcagagaatacgaaaggaggaggcttgctgggcgtggtgctgggttgagcagtcaagaaaaggctaggagcaggcttagccgctgcaggctggacatgatcaacggtaggggagctcgatgggctagcagcggtaaaggagaaagagggcgcaggagtcgaggctcccggtcgtcccaatccaattcctcccatccctttgccggccgtcggtgccggtgagtcgacgggcttcttgggcatggcgaaaaagtcgggaacttgggcagccgtagtggatgagccgaggacgagggaaggtttcaccggggccggtgtagtcttggtcaaggctgatgcattcaggggagcagcggccaagggcgacgaggctcgaggacggttgactcccgcagcatctaggaagccgcgcaccttgcgcacagccgtgacatcaacgtccttcttcttcctcggtgacggacttcgtacgggcgcagggatcgagacgggttgaggcgattgcgaaggctgtctgtttcgcgagccgtacgcatcctcaccgtcgtcctccattccagcctcatcctcgtcatcgtcatcatcgggaacggcgaattggttggctcgagtctcagtcttgcgcgacgcgcctgcagcgggctcgtgtttacgatgggtgacggcggactgggctcgcaagttggagccggttccggttcgcacaatcttggtggccgagggtgagaactggatgttcatcggtcccgagatctttgtcggggcgttggccatgctgaaagtgaacggtttatcggcaggagcctctccctcgagctcatgatcactgccagactcggcgtcgtccttgtcttcctcctcctgctcgacactcttgggtcgagaatatcctgatggtttacgcgcatacggacgttgcatgacactccccgtctttcccttttccacctccaattccttggtcctcctcgtacctctcaacctggccggaccttcgctcagacttccagttgtcgacaatcgcaatgcctcttccgccgcggatgatgccttgggcacacgcacggccatgcgtttccgcatctgcctcgtcgacaacgaattgggcgtgggtggagccaggatcgaggaaggtagaccggcctggatgttgggatgccgggaagacctgcgcatttcggccaactgttgcaaaagcgcctcggcctggacgttttgatctacgggggatgataccggatccacactcatcctcccgctcgtccctcgtcgatacctcgaggtgtcacgttcgacctcgacgtccatctcttcatcctcctcgggcgcatccatgagaaactcttgctcatcctcgtcttcgtacgtgggtcggacgctgtaccggagacggctcgaacgcgtagccgctcgactaggggaaggaggcacgatcgacatgtccctcatcgacgacatcgaacgacgaggcgattcagcgcgaggggtaggcgaagccggttctcgtgtctgccagagcaaaggacgggaaagtaaatccgtcaacctctacctggatgaacagcgatcgacctggtccgacataccctggtatttgccgactcgaggtccatcctgctctggctgcgcaatccagtccttccgggagaagcaggcacggtgctcccctctttcatagcccgttgtctataagcgaccttctcggcagcttccggttgactcctgaaggggctcgacattcgacctgcgggcgcggcgaggttgcccagcgtactcgaacgcgatattcccgggccgtagagtggggatcggaacgagccgttcgatggacttgctggggtgtttttgctccggtcgacatgcagggtcatcgtctcggatcggcgcattccagaagaagccgaggtcgatggccgggtcgcgttcctagcgggtgatactgcgagcatagagactggaagatcattgtaaccaccacccatagtcctactcctggttatcgatgtggatgacgacgccgattcggtggtcccgaacggacgagcatagttgggcacacgctgtcgatcctgcctctgagtgggtaatcgagaactaccgtactcttgcacgttgaagctctcgacggctcgaccctgaacatcgagtcggttgggagagacgaccctctgtctcttgctcggggtgcccgctcgctcgggggacatttgcggggcctgccgtttggtcgaatcgagcgaggtcgaggtgggcattttgcgttcatccgaattggacgttcttggcgtcggatcgacttcggccggggcaggagaggcggagaaccatctgctcaagctccttttgagtccacctagaagtccctgctgttgagcggcattgttttggatgttggacgacgaactggcattcccattcgaaggacgttcgtacggcttcttttcgtgttgacggacgaccgagttgcttctcgacggtccgatgagggacgaagtgggggaaggtgaccgaggcatctcccgacttcgacggagatctggtttggtgaattgccggtggtgtagatcagttggtggtcgaggtcggaagaaaatcgatcgatgataggtgaagggtcgatatgacatgggtgtctttgggctctaaattctctgacatccatcgcttcctcgtcgtacgtcacgcgtcgcgcaacaagccagagtcgatcggtcgccttaaaacggaaaagtcgatacccctgggtaatctcgacgataatcgtatctcgatccaacctgtaagcctgaacatggttacaaatttactgatcctgatattccatgatgttgggtccattaccgtgcaatatctgctcgatctgatgatatcctgtgttgtcaggtcgatgcccattctacctaccatgatcctcatgaactgcaccgattcccacgcgtttccacgcgccaaagttggaattcagatcgaagcacctcgagagggaacgaatcttgaaagtcggtcaaaagcagagcatacagtcggccggttgtccgtgacaagtgataaagtagcgacgtgacactcgacaaacgactcgtgatagactcaggatgattggactcaaaggaacattaaacgtgagcggatcttgcgttgctggaggagctggtctttgcactgacgtgatccctacctgcaggtcatcgacaattcgggcgccctgatcgccgagtgcgtcaacgtgctcaaagccaagtcggctcgagggatggctaccgtcggtacgctcgcaagccttttcgatttctttgcgatccggacgagaaagctcaccctgttgtatcgcaggtgacgagatcgtcgttgtcatcaatcgagctcgacccatctcgcaagtcacctcgggtccctcagcagcagcgacctcggcgagcaacatccaaaaagtcagacgaggggatctacgacgggcagtgatcgtacggacgaggttcccgcttcatcgatcggacggacggaatatcaagtgagagactggtctcatctcgcccacgcaccattcgtcacgggactaacctagtcgacctcgtgtgatccgggatcgcttcgcaggttcgacgataatgcctgtgtcttgttgaataacaagggggatatgatcggaacccgagtgaacggcgtcgttgctgccgagctgcgggactcgcaaggtggaccagagggaagtgggggcaggtggagcaagattctcagtttggcgggcaaggtgagtgatcttccgacaccgtcaggtcggtttgattatcgaaagctaacaacggtatcgatgttcgttcatcaggtcgtataggggagaagggactgtcttttcgatttggtagtcgccagatctgtaattgtaccaacaatccagcttggcctcgtatggaggtcggccactagcattcacgtttaaaccggatcacgtatcgtccagacgaaagactcgtggacaatactgagagtcattccggacgaagcgttctttgatgcgagagaacacagtagggttggacaacgcgcattctttgggcaaacacggcgaactcgagtctgtgtcgtaccgacatgactgcatcttcgagcaagggctcaggacgacaacgctgtcatctactacatcgcaatatgccgtttggatcgtgaccgtatcgcgggagagcagctataccagactcataaggtcgtccctggacgctttacagtaggattgagcgacgtttgcgagtcgtccctcgtcagatctatatcgccgctcatcatggagtcgactcgttgcggcaagttgaagcgaggggtggacgtagttgcagtgaacggagaggtataatcgctagttccgattttgttcaattcgtccgcccactcgcctaaatcacagctgccgttcgcatcgagttcgtcacgtccttgctccgcccaagcccatcgctcgagcctgtcacgactctttttggtcacgaacacgtggcacggggacatgtctttctcggcctgagttttgtcaggtaaatgcggctgccagatccagctgttcgtcttgttgcaatatcgccggaactccacggcttcatcgacgttgtcgaagccgatcgacacgtattccccctcagggaatttgtcattctccatcgctctgagatcggtttgagcgtccatttttccagttactgtctccgcgcgtagaattcgttttcagtcgctaagcatatagtgttgtcgttgacacaacgcattggatacacgcgtatgtgtaccgatgcatcgaatgcacctcggtagttatggtgaggtcgctcgcatcgcgcaagataggacggtgccctgctgaaaggagtacacaactgtgacgcggatcggtctcacgtcagctgcacgcaatcctcgaacacgtcgtctcgtatatcgagcgattccccctttcctttcattctgttctcccgttaaacccgctcatgacctcatcatcccgtcttaagtgcgcaggatccatctgttggcgttcaggtgttaatgaaacgctgggtggtcggacttgaaaagatattggggcgctctcaagcttttgtccattggtcctctgaatgggtgaggagaccatatacgaagcgcagatcctccctgatgtcgaatgtcttagactctgcgactctcttcctgattcttgctttatcgtgcaacagcataatcaatttcagttagtatcttatctcctcaaggggactttcatcgaattttggtaccacatcaaggagcatcccctcctgctcttcaatcagagctctgaccacatcctgtcataccaaattcccaagtcccagcatatgacataatgcatcgaacgtgcttgaagaatccaggccagctttgtcatcgatttagggtcgataaacggcatgtccgaaaggagacgccagtttatgacttttgtttgacaacggcattgtcgcctgttcaattggagccgtccgtcaaaacagaatcagactcagccgtcacatttttcaatccgatcaagccctgagagtaaagactttttgacgaggcgcaggaagagagagggcgtcatcaacacatcctcttacccattttcatctccttcacccctaccgatctacgttcctttacacctggcatcggatcagacccgagcgagaagtcgaaaccgcatcattacgcacgtcgtttcaagctgtgaactctgatactgaccatcgcctacattcgaggcgtatgggaacgtcgcaagtcggaggaagtggaccgcgatctatcgcgggtcagtcgccgttggttcgaccggggaggaaagtatcgcgattccccttaagatgaagtagagtactgaacatatcgtcaaaatatgctacgagttgcaagctgaaggcgtgctttcctcgttgtaaaccatcctcattcaattgacggtcgattcgctacgagctccccggtcacagagtcgcaatctaccaaaagcctctcatcgtgctccggctgatacgcgcgcgcgaacaagctcggtgatgacgaatcacgggagatgatgacactgaccgatgatgatcccccgatcgatcgaaccagccagagtcgatgccattcgtacaggctggtacgtatcagaggcttcaatcgactatagtctatccttcttgagagcttcaatgcgatacggcgtcacaaggactgcagtcgtcacaaggactgcagtcgtcacggatctgcatgtatcgacccactagaagactcttacaacagctcggacctatacgccatcaatcccgcccgctcactaccatgtcatcaaccagcaatctgttcactcacccggatctgggccagattcagtacctcgtaccgcctacccacccgcatttgacccgatttctgaacattccgtacggcaaaattcccgaacgattcgctcgctccacagtgcgagatgagttgggagatgggtctggaccgtacgtcgcaactcgagcgggaccctcaagcgttcagccgcgaggttctgccaagatggatgcagaagggttgcaactacctacggatgagatcgaggacggggaaggagaatggcaatcggaaacagattgtctgcaattatccatcaccttgcccaagtctaagctagacactgaagatggtatgggggtcaagaagggcacgaagctgccggtgcttgtttttctacacgggggagccttctttctgggatcgggagaccgttcgtactataaccctagcacgttcatgactcagccactcgagtccccagacgacattcagaacgcccctcgatcgatgttgttcgtcgctgccaaccacagactcggcgctcacggattcatgcactcattcggcaactctccccccaacaacggtctgcacgatcaagtcacgctgtttcgctggatccacaagtacatctccggatttggcggtgacgccgagaacatcaccttgatgggacaatctgctggagcggagagcgtctcgctgcacaacctcgctcggaacaacggggaatggaagccttatcggcggtcgatcatgttcagcggtagtcccttgtgtatgccagccaagacgcccgaggaacacgaggcgaatttcagagagttggcgggcaagatgatgggcgacgacaaggtggaggataggtccagcgaggacctgatgagcgagatgaggcgaggtggtgatgagtgggaggacaagctgagggacctagcttgggtcggggcgccgtgctcacaatcggagatgatgtcctacgagaccccgtcgctggcgttacttcgagggctcgtgccagccaagatggacgaaccggctagcacgggcgaagaagccactgtaaacagccgggaagataggggcaaggaagatggcccatcccctcgcttcggacggtgggtggacgaacaactcgtcagctggtgcggtttcgatggtgggatctcctacaccacgatcaagtcgaaccggtcgcgcaaggaccatgctcggcgattccgttcgatagtacgggatgtgctggtagacaaacacggcaagccgaaagaggcggaccaattgttgacactgtatggactccaagatcgtgatggatcggacaaaaaggaaggaaacgtcggtggcgaaagggaggatatagatgacgacgaggcgttgaggcagatttgtctcttcgagagcgacttgggcttctttgcaccttgtcttgctgaggctcaaggtaccaccaagaacccggctgctgcgtctttgtcctcgcgccagtccggcgagacgaatcgacgaccgcgaacagtcctccagctgttcgacctgggcaacccattcgagggcccaatcactccggggcaatttgccacgcatacatgggacgtggtcgccctcctgggcgcttacgagcatcgcctcgatccggatgtcaagaaggttgtgcaaggttggagggaccggatcatcgattacgtctgtacgggaggcgagaaggctggtttgccggaatggacagagggaagcaaaggagagatggtcgtggtcaatagtcagggatgggaaatcaagcccacagaagaggtctatgggaaaggtactcgacggggcgaggttctcagaattgcaaaggggttgaacgaggtctggggccaggacatattgtggaatgatgtctgtcggcggttcctcatgaagggcgagtagcgcagaaagccgaaacggggtgaatgtatacgtgatcaagccgccagctacaatgtccatgcacgccgagcctgtctgcttgacgtagcctgacgaccagggtcgctcgagctagagtaagaagggctggcgataaacggcggtagaactgttcctccttggcttttctttcacgattcccgaagacccggagcgacgcggacaatccccgagcaccccgatccataaatccgaacagtcccgatcaaacccagtcccgtgccacctgagactcggttagacccccctgattcttccgagatccgatgtaggtgtttcggaagtcatagtggtcggaggtagacgccgtgtttcagacaagactcgtgctagaggttgtaaagtcatggtgcgttgtacaaggtggtatcgagtcaaatcaggtcggatacgaggtcaacagttgcaaagggggcccgtgagaacgacttttgggtcgaacgtgtggggaagtcctcgatgaaaaaaaagtgcgggggcttcgcagcgatttgcgagatcattcgggaactcgactaagcgtttcccaacccggggcagaactaggtcgtccgggcggcggcggcggtcatcgtcaacttcagacagaccttcacactatggtgtacgacattttggaatttcacgaccgtgtgtcagagtgtttggatccttatccgactgtatctattggcctgccgacgacccttgctcccgtggcccgtgtttttttctgactcgaagtgccctgagattttgtatccgaggcgatgtcatcggcgggaatgccacgccataccgatacaggttagcgaagagtctcgggacaaatgcctcacttcctgccctctctccccttccctccaggttggggttgggggaaagggtttcgtcgatatcaacaccgtcgtggtggtttcaatatgccgtccatttcattagcaaagctttgtgtttcctttcagtttctcttctcacaaaacaaatacatacaaaaactagacaaaaatggctatcaccaaggttttcgctcgtcaggtaggtactgattccgtgctccctttcgggtcctcatttgctccactacctggaggtcgaacgtgtattcgaagcctgctgttcaaatcgtttgaactgatcatgtattgatctctttctcttcttgtagatctttgactccaggggtaaccccaccgtcgaggtcgacctccacaccgagaagggtgagttggtagttgcgcgaggaaagaggactcactcgggtcattagacgctgatggtcgcgacgtcgcctttctacctgtttctgcttctcattaacgcatctcaggtcttttccgaggtgagtggccatggtacgatcttccagtccacaggaccaccgactgacgatgatctttgctcacagcccaagttccctcgggtgcttccaccggtgtccacgaggccgtcgagcttagggacggcgacaagtctgcctacatgggcaagggtgtcaccaaggctgtctcgaacgtcaacgacatcatcgccaagtccttgatcgagagcggtctcgaagtcacccagcaaaaggagatcgatgacctcctcatcaagctcgacggaacccccaacaagggcaagttgggtgccaatgccatcctcggtgtctcgatggccgtctcccaggccggtgccgcccagaagggtgtccccttgtaccagcacttggctgagctcgccggtgtccaggctccttacgccttgcccatcccttgtttcaacgtcatcaacggaggatcccacgccggaaacgccttggctttccaggagttcatgatcatgcccaccggcgccgagtcattcaccgaggccatgaagatgggttccgagacttaccaccacctcaagaaggtcatcaacaagaagtacggaattgacggtgcgtcccgagtctggtcctgacgagtaagacattcgactgacttgctgcgacgtcgaaacttgtagccaccaacgtcggtgacgagggtggtttcgcccccaacgtctcgggtgccgaggagtctctcgagctcttgatggaggccatcaagtcggccggttacgagggcaagatctcgatcgccctcgacgtcgcctcgtccgagttctacaaggacggcaagtacgacttggagtgagtatcgcccggggtgtccaaaggctgcgcggagagataggggctgatgcgggcgactttcaacagcttcaagaacgagaactctgacaagtccaagtggttgtccggtactgagctcgccgagctttacaactcgtttgtcgagaagtaccccattgtctcgatcgaggtgggccgcgtcacccagttcgcacaaggaaacgcagaatcatccactgacgcgctttcgtccgccctcacaggaccccttcgaccaggacgactgggaggcttggtcgcactttaccaagaacacgaacattcagatcgtcggtgacgacttgaccgttaccaacaccgtcaggatcaagaccgccatcgagaagaccgcttgcaacgccttgttgctcaagatcaaccagatcggatccatttcggagtcgatccaggcgtgagtaatttgcttccgaggtcgcgcgcgtgtcaagctcgatttgcttccgcgatgcgcgaccttgagcatattcggtcgaaacgaccttttacgacgttgctgacttcgatggcgatccctattagcgtccaactctctcagagcgccaattggggcatcatgacgtcacacggaattatcacggtgtcttcctcctctcaatgccaaagctaacctccttttttttttttaccgcaacagaggtccggtgagaccgagtccacctacatcgccgaccttgccgttgcccttaggaccggtgagatcaagaccggtgctccctgccgatcggagcgagttgccaagtacaaccgtgagccgctaccgccagccttgaatgccttgagcatcgctaatcatctcttgcttgcttctccgttatacaggtctccttcaaattgaagagtacgttccgcctctccctgtgattgaccgttacgacgactaatcctttgcttaccgtgtttcacagggagctcggctcgaacggcttctacgccggagcccagggtctctccaagggtacccaggcccccgccctcaagcagtagatgggtagcggccataaacgacctgactttctgccggtccgaacttgtagctagtcagcgagtacaatttgaacgatgctgttaatcacctagtatctatgctacaatgttgcatacagatggaccgtcgtggtggcgagagagaggcaccgtcgaatttgctggcgatgtcgcatacctgtggcttatatggggctatgcaatccgcttgcattgcgaatcaacgttgggcatagacaaagaaagccggggggcttcaattgatcggtgacagagggggcgatctatatgcgaccatccaggcataattggggaagcgacataacgaatatacaaactgacatagctatgggacggcgaagtagccggcctgatcggaagcgtgcaacatctagtgggggacgagcggtttggggactaagcttggagcgtagatgatgacgaaaagcgaaagacatgaaagtcgagacgaagaagatggttctagtaccgggcatccgggacgaggaggcctctgggacgttttcgaggtcgatattcggtgacgccgtccctggtggaccaagtccctgctcctgacgccttgaatcctggtgggagaacgtaggtgcgcccttactcgcgctgcctttcccgaagttggtcaacgagactgcgcactagatctcgcagttcctttacctgcatgtttacttcgaaaaaggtctgcaccttttcgatcatgaaacatcgcagctgctggtcaccagtcaacttgagtgtggcaaggttgtcatcagcattttagtcgcgccagccagccgatcagccgagacatgacccacctgtaatctgacgttggtgatcgcggctgcagcagagcgaattgcagggaatgctgcgaggaacgcaaagtcgtcccgcgagagctcggcgtgaaggatccaccgatagtcctttcctccgacggtaagtgagacgcgagcatacattcatcttcccctgtccgacgaggttgatgttgttcgcaatcgcacacatcaatgcctcgtgccagtaagggtcttggcgagtcaggaagtcatcgtacgtgagacctttctcttcggtccggcatggctcagagactgattacgtttcgagagcctctatggtgaggctggccggcttgccgccgatgaacccggtgagcgtcgcagtgtgctggtcgagagaggtctggtcgcgacccttagaagtccgcagctgttggtcgagttcgaagagagtcctgacaccgagctctctggtggccgtgcggatcggccccaggtcattggtgggagcccaggttcccaccaggggtagatatgtggatgcgtcgagctgggtatttggcgcgccctcactgcttcgggaccagacccagacttggtgatcgctcatcccgaagttggtgcgaactcgaatgtgaaatgccatctttttgcgatgggataggtggagaattgcagaggtgatggctgtgtggaacatgcgtccacctctcacagcagcagcaaggctgctgacctgcaaagctccatcatccgtgggcgagacatgtttgaaaggtatcgcctgagcagtagcacgaccgaaagcagggttagaggggcttcgctagtgttatagaccagacttaccgttacatcaaccactagttctttaagtcctgacccgtcgacatgggtgctccttctctctcctttcttttcgttcgatcctcctaactccttcggttctgccaggtttaggacgtcacgaatcgcccccatcaccagtgctcctacccccgttcggcctctccccagatcgggccatggcgcgccaactgtcgagttggcgggtgccttcctctgtgagagtcggtaacgttcgagaaaggcgtcccctggatagacgcgttaaactgtttgattgcgtaaagagacaaggatgtgcggccgaactcaccttcatcggcatcaaccaagtctttctgcgacccaaatgccaaggcttcgatctttcgcacatcctctgcgacaggatcgattggccagtcgctaagatggctcatcgtcttgtggtcgcacgccgtgaactggtagttacgaagggggaaagcggataattactactatcgaaacaaggattcttccgatccctacgtgaggcgagtagcggtgatttgagtttgctaatctgctcataattgattgaatctcctcctcctgtgtgctttcgtgcatcaacgtcatatataaacacctttgggtcctgctggcatattgacctggaagtctcgtgacctctgcctcgagcacgagaccatgtctattgcaaatggcaggtttcgaccgattgcgcagcatttcctaacatcaattcttggtgtcacaacgacaggatgcggtgagacagagtagtgttgacgatgcgagacaacgttgatcgattacatctgtttcatgcatgatcccctccccgatgcctggtccgatcacggcccaaatcatgcctgaaaaagtaggtcctgtgtgtcgatgccgggagcaatttcggggtgatcatcgtcgatggcggaacgtctctctccgctatacttgatcgattgatggtggtcgctccatcgactgatacccgatcgacatgcccgagcttgagtttcatcgttgtcacgacacgacggcaacgcgtgaaaatccgcgcgtcggtcgccatccttgagaaggatccacctcctttggctgagattgctgtccctgtcgctctcaaaggcatcctttcgggaggtttctcggattgctcgcaaatatttctagttctatttcaagcgggtttggttttgagctttgcatggaatcacggatctgatactgtcttttgtgtccatgatcgcgctccacaacacgcgactgataacgccgagggccaacgtcgcgtaatttcggaaggagcatgtttcagctttgcccaaaacgcccgctcacctcaaggctcaactcggagaaatttaccaatggccagcattccattcattgtcggcaattgccagatatcatcatagaacactttaacaattatccagcccagccagacatactcaaagaagcatacaggtaagttgctgcagcggatagtgaacagctcactggactgacgccttgctctgctccacagacgtctcataggagagccggctttcaccatgtgttgcagaagtcgccaaaggtaacagaggcagtacgatcaagcgacccatatatactttatcaaaccaaaacgccggagtgctcctgggttgacacctacctgttcagcctcggcccaggctgtcaagaggcgacgtcgagaacggggtctccccgccctagcttcggatacttagaaggatccagatcagattaccgaccgatggtgggagctgcggttcgatttgaccgaaatctggtcagagccctgattgagaagtgtgagcgcgttccccttgccgttgtgtcaaaattcgacaagtaacccccccaagacttcaaatatcccgcgcccctgaaggaatctgcaaacttcaggaaaactattgcagagttcaagactttcgatgtcagggacggtctgccccttgcatatggtgtcttcacccatcctgaagaacactggacaagggcttgcgagcgtctcgacatcgtcctgaggcagcagagcaacactgccgatctcccggccaagcaattcctcgctattgtccgcggcgctactagcggctgcggcgtaccggccaccgagagccataacatcggcatggacaaggcctttggcctcgtcgatcggaaagggatctgccgcacgtgcttcatccgaaccgccggggctcagataagacagtgttatcggccggcgatcccgcaaggagacctgaagcgcttggacccaaagtccgacaggcaagagattgtcaccttcctcgtctttctactggtgagggaaccgcggctggtcagtcgggcacgtggaggaagtcaacatcaagccccacagtatcgcccgttcgggaaaaggccgatcttaaaccatccccgattgcccacagccagtcgaactgacgagcccattgtcatctcctcggacgatgacgaacagagaccaccctaggacgtccctcctgctacgtcgtatcctggaggtccttcgcggggcaaggtcaggaacatcgtcctcagcgacgacgaggatgacagttgagacgccgagagttctcatggaggggagggagcgaccggtaggggaaaagagagtcttgaagcgcgatacaggacgactctgttggcttgaccgcgactttgtctctctgttttgcgaacctgcctagccttacgtatgtctcgatcagactataacgcctcttatcgctcggactatatcacaaagattgcgtgtgaagtccggccgttgatgctacgatatattatgtcatcgcgaaccatctagccagctccgccaccatgacacctgatccgatacatgcgcgattgcaaatggacacagagcttcctattggcgccgagggtccggccgtttccgagtaggatcgtcacgttgtgggtgtttatgacactagaccacctgacaacccaccttaatacaccctattacgcggctcccctccagccagatagtctgacaaaatatcaacggcgatattgcatcccactctggtcacctcgtcggtcgatcctccgaaatgtggcatggcaacgacgttcagcaggtcccacaacttggcataacgctccttgggtggcggctcttgatcccacacgtcaatccccgcacctcctatcgtcttgccaaccaatgctcgatagagggcctcctcatcgacgatcccacctcgagcagcgttgatgatgaccgcggatggacggcaaagagccagctcgttctcgccgatcaggtgtctggttgcaggcgtgtatggacaatgaagcgatagcacgtcgatctgaggcaacagttcctccaagctcgaagcccgttcgtgtgggataaccacattccccttctcattcgattgcgcagtccagcgggtctttggggaggtcggcgaaaagaccaggatacggcagttgaacccgtagtagaacatcttggccgtctctcgtgcaatatcacccattccgacgagccctacggtctttccgtgtaatcctggagccaatgccgtgatcgaagggatcctttctcctgccctaagacgggtgttgatctcgcctatccgacggagcaaggtcaaggcgaagccgacgacgagctgtggcaggtgaattcgtcagcgtgcgagcctggttcatgggctgtagcgaatcacctacctctgcaaccggcactgcatttccccccggattgtttgtcacgcaaatgtgcttctccagacaggtggctttatcgatcgagtcgacccccgtgccattacgagcgatacacttgagcttgggagcggagagcaattgagctcgtgtcagtcttccttgcctgagtactgcacacggtcgatgtcagatgatctgggagggagacgggctctccagtgtggctcacagatgccgtcgacctgagcaagaatctcttcctctggtagatctcctggctggtataaatggaatttctcctgtgcgtacttgatggcctgataatagtccaccgacctaatcagtctaacattcactgatgaagatgcacatttggaagatctatactcacctcgacgtggaatgccgagggcatgtaaaccttcggtttgtcggtcttcaaagggatagtcatcacagactgattactgtgtcaattggtcaatcactgattgcttggtgcctgttgaccggattcgctgacggagtcgatgctggaaacagcgtactcgccttgtacggtatatgagagtcgcgagcgagcgtttgtaatctgtcgttgcttccagttgcacaggtgcaacttgattcgcgattatcatcataattcgcaatagatgatcgctcaactcttgtcgagtcaacggctccctatgacatatttccgttttgcttccgaaatgttcgggcgaaccggggctcgggccgaaatgaaggcttgcgtctggctgcaattgtgatcgttgcctaagcctgccagcacgtcaactcgtcgagccatcttgcggacggtcggccagcgtaagtacgcccttgacttatctttgaggaaacagctgaactctgcacatgattacatgaatatatcagattctaaagctacattaacacagcgagctataatttcgtttagatgctacattgtactttagtcttgtctcccgcacgcgatcaattcgcaaaacctttgtcgcggcggtgtccgttccctttctcaagcctgcgtttcagagctggtccggttcaacggccgagtgacttcggctgactcccccacagacgccatctcgaacgccgtcgcagatcgactcttgtcctccatcaacagcgcaacgaatgcggagacgatcgagacgacagccatgaagatccaccagaggttgcctccgaggactttttggtcgatggatagcgcgaacacctgatggttcaggtcgtcagtatgatttcccttgcgtccgacctgaattggtgtcacttacagagctgacgagccagggtccgatgacacgcgacagacattgtacgcacgtgctaaccccgttcaatccagcgatggctcgtttgtctggacaagccagctgaacgactaccatactgaccgagttgctcatgcctgtatggtcatcgagtgagaatcgctgtgacgagagagcagttcgggcagagatgctcaccgatgaacgtcgataatgccaaccacgaaagaagcgccgcccacatgagccaacttcgagattcaccattctctccagcgtgctctccctctgaaaagactgttactatccgaacaagtgggagggtcaagaagaccaggacctgtggcgtacacgaccgcgtggtcagcctcgcacagccgaggtacggtcgactcattcctgactcacccaacctgcgttcaaacgctgaaacgcgcggaccgagccgtactttcgttgcatcttgctcaagaacgtcagctggcagacgaccgaccagacgccctgtatcgacaaggcggtaccgatggcgctcgggctcatacccagaccactaaacgatgcgggcgtccgtattagatagggcttgcttgacacaacgcgacgagattcaactcaccctgaatgcgttggagtgtatgcatacagcaagatcagtgctgcccatccgccaccgataaatctgcatttcaagttcgggtcaaccagcggaccctttcagtcggttgccaaggtcgtgctcacgacaacaagaacaagctccataacatcctctgaatagacttgacgctcaaaagttccttcaatccccattgcacttcattctctggatcccactcgtccacctctttgccaggcgtgtcaaaaccgtctccttttcctgggaatgagcggggggacttgagcgtgggcgagtctggatctccgaccagcgtgcgggtatcatcgtcatcgtcttccgggtcaacgttctcgattctatgatcttcgcttttgaggggctggtaagtctcgtcggacggccgggcttgagccttgcttcgacggtacaacagtcccgcatgggtctgcccatgtgtgctgtcaataagcctgaacgtgaagggtggcgcgcgggttcccaatcctgaccgacctctttcatgaacaaggccgtgaacagtaaccctgccagcgtgatcccggtggtcacgaggcagggcaacaggtacggatgctcctcgagctttccacctctggcgaataggtttgggtaccgctcgacagggtgagagaggtatcctccgattgcgtttccgaggatacttccgatgatccagaccagtccatacaatgcgaatgctatcaggtcgatcgactcgatgtcagtgcccaaagccagtcgttgcaagtgcacaactatgcggctcttaccttcaggtgcattcgactcgtcggtaatctccgagacggctgcccggaccacctttaaccctcagctcgtctatcagcccgtgtcttctcgtctgacagaaacggcgagcatgactcacagcgacgttcccgttcaaagccccgctcagactcctcgtcacgatcaattgccaaaacttggtcgagtacccgtagagcgcgctcgagatggccactccggcgagcccgagcatgatcacgggtttccgtccgatcttgtccgataacttggcccagtggtagacgctacggatgagggggtcgggagaggtgtatggtgtgtgagatgggttgggacgtatcgaaatgggattgaaatcgattggaatcgcaatctcaaaagtcagcgcgcgatgacaaaggcagacgcgtggtccaaggggattcttcattcggcttacgtgaaactgttacaccgaaatcgaaccgtatcaagaccgaatccattcgataaatcgggcgagatcagctaggctgccatcttgagactctcttctacccggcagtgccgtgcgcgaaacgcacaattgtacaccagcaaagacggcttcaaccaccccgctgtaatacccgacccgatcttcattgtcggcgatcccgagttcgcccacctgttggttgatgtacggaaagagcgaggtgtagctgactgctcgtcgtccgagtaacgtcacggttgtgcgattgggaagattgaaagcagctcatcagtgtaaatctgatgagacggctatatcagaggagaacttgctaggttcggccagtctgtcatcgagaaaacgggatagaagcgatcaccacgaccaaccgaagtgaatcccgaactagtgtcagccgattgctctaatttgacctttgcgggtaaagacgatgagagagactcgcctgacaatcatgagcactgccagctgggctatcggtagaggcgtcctcttcggtggtaacgaaggcgagggaagaggggaggctgacaacatgatgtagacggtgttgcctttccagatgatcggcctgagcagcctagacttgtggttcaagcaagcgagtgaagatccttcaatccaggtcgaacgacggggcgcagagagtgatcgagtgtcgaacagatcaaacggacgaaatccgcagggagcagttctttatcaagtatgtcgagccaggaatagtttcaaggcagatcgctccaattcgcaacgagtctatgtgagcctcttccttctctagtctaggacgcagcaggcggatgacaatctatgtcagcgagtacaatgctctcgatacgtgctcttgccctttgatcaatgaatgaataggcacatcatgtcgtcttatcgacacgaggaccgactacgctctgatcctagctaggcagaccacctataaatttagatccacccctattcctaggacaattcggcgaacgggagggtgagtgagccatgcagattcactcaatcgattccacttcgatggcggaattagcgcacatcgaagtgaagggctgggaggagggggaagatgagcaggtttcgtcggatgaggccgatgtcgacagaccgagtcagatggaaccacacaggacactttgcgacaggtggaggtcgctttcgctcctgctgtatcgatgtgagacggagattcccaacttctcaaaagtcgatctcgtcaccgtcaccgtcgtcgtcgtcgtcgtcgtcagtggcggtatctcatccaacgccgacacggatttgaatcgatccaccggaccgggccgacgaggtgaaaatgggggcaacttgatggaagatggattggattaggtaatcaacaagttcggttccgcaaaatcgtcaactcccccctcccattctggcgactcatccttgatccgttcagtcacacagacttggaagcaattaccgcttgcctgacctagcctgctctttcaaattcaacctgccagcgtactttgcatcggctgctcatactacagatatatacagacacaatgtccaatcaatttaagcaggaaatcaaattcgaggacgacgatctcgagctgtacggaggtgagcacagaacgatctcggaagctcgtgcttccttccatccacctcggcacgcatgtatatctactcaccgcctgtatgtcgtcatgaaaatacgcagacatcgatcacgaggatgccactggagaactcgtcgatcctgattttcaaaaggacgcgacggacgagcgggacgaaggagccgtggcgaacgctctcggggacgaggacgaatccatgaccggtactgcccagggtcaagctcaggtgagtggcatctccccaacagctggttccgggcacaacgagcgtttgctacctcttaccaccgatccctgactcgtcttccgaccccaccatagcaacaacaaccagctccaatcccaacattccaatccaactcgcaccagtctcaattccaatcccacccgcagggcaatgctcaatccaactacccgaaccagaaccagaattcaggacagggtgggcaaggttatcagaaccgagggtacggcgatgaaggtagacctcggggaccaggaggagattccaacgaggaagggtgagttggacgtttcttttcctcgaagccctctctgttctgttgtcagtcatgagccgggggcaagacgaagagaagagtgtcgtcctcgctcgacgggtactcgtgggcgccggaagcggtggaagaaaggagagttgaagcgggaggcgcaggtgggctgggagacccctttcttggtctttccccctccccctgcctccaacgtcggtcacgccattctacggactgccagacctaccgaaaacatgcagcagagaactgacgatgtctctcctcaaattttttctttttcttctttccttcttattattgccgtttcgacgtcttgaccatacgtcctgattctacacacatcggcgggcatcgaccatacctggtcgatgaaacgtggttcgcttatatcacaaatacgtatctaccgtatacgctcaatcttctactactccttactacttactacttgctataatactacggcaaattcgataactactactactatcgctacttgaatctactgcctatcgctacccctacgactgctacctatactctcggggtgactatgggcgggaacggacgatgaaatctatactcttgaaacaatgcggtacgctcgatcccgggtccactgatgatgataccggttcgtcccgctttggtcggtctggctcgtgatcattccggcgcaatatcaccatgggcgaacgtcgtggtcgttacgcaaatgcgaaaaacatatgaccacggctcgggtggaccgcgtcgatacttcatctgggctgtcggcgtgaccggcttttgtgtctggtttgcataaatgcgacggatgggcgcacgatctacagcaagatgttcattggagggctcaactgggagacggatgacagtgagcaactgtggatgctcgccttgtagcgcaagccgggatcggctgaacccccacctcccaccccgacagacagcttgcagagctacttttcccagttcggtggggtcgcttcgagctcgatcatgcgtgaccctactgggcgttcgagagggttcgctttcttgacgttcgaggatcccgcttccgtcaacgccgtcatggccaaggagcacgtgctggacggcaagattgtgagtagcaacatgccgcgtgggcctttatatctggctgactcgcttgccccggacgcctagatcgacccgaaacgagcgatccctcgagcggagcacatcaagtcgcaaaagatctttgtcggggggttggcgccgaccgtcaccaacgccagcttgaaggcgttcttttccgaatatggcaacgtcatggacgcacatgtcatgttcgacagggagacgaaccggaacaaggggttcggattcgtcacctttgaggacgatgaaggggtcgagagggctatgggggcgactggacaggaactagatggcaaaccggtcagtcgatcgcgccgagctcgtttccgtcactgctctgaccatctggctgtcgatagatcgaggtgaaaaaggctcagcccaagcatcagcgcgatcagggcgataccaaccgtcgccacatcggctcgtacatgggcgaaggtgcccagtcgggcaagtacaaccacggcatgaatgctggagccggtatgggtcagaaccctataatgggtgggatgaacatgggaggcatgggaatgggcggtatgccgggcatgatgggtggcggaggattcgatcctcaagcgatggccatgatgtatcaacgaatgatgatgagtgagtgcgatggccctgcagtgcggtttcatatgaagggacactgattgggtgtttttatagacatgatgggcggaatgggcggcatgaacccgatgatgagcatgatgaaccagggtgagccgagccgacgagggcgtttcgataaagtaagggcactcgttctgatctcgacttgcttacttcaaggtcaagctggagcaatgggtggtatgggtggtagcagccctgggcaaactgccggcgcaatgcccaacatgatgggtgagctgcttcgatcctttgccaaaccgccaaaccaaccactcatcgccgccgaaatctcgctccaggtatgaacatgccgggcggtgcatacaacccgatgatgatgatgaacaggatggcaagtcgtcggcccttcaagccagccagtcctcgagctaatctcgtcctgtatttccatagacctctcccaacgccgctgcctcggccaccggtgcgaccccgtcccaaaacccttcagcgacgcctatgaacgctcctcgcggacctgcggcgatgcgtccggcaggactaccttcggctccttcgagcggcggacaaccggcgcgatactcgacgcaaggccaggctaggagcaagccgtactgagttggtcgtggctgagcttgatgataatgccaagcaatagttttccccgttgtacgaccccccgagcgcgaaacaaaccatggcctccttcggtatattatgtgcgtcgagcttatatgcagacattagcccgagtaacggccctagtcgctatcacaacacgcccattcgcaagttgacgagttcagcgcgccatggctcaaagtgttcggcatgaccgagccgaccgaaaggctgacggggagaaacatcgagacgatgcaggccgcaaggaagcagcacgagacggagcgccaaaagatcgactcgctatgcaaccggctaaaggagagtctggtaagataaagcagcaagcatcgatgacttggctgaagcaaccgagcgcgtgatagttcgaaattgggatgatgcagctgtcagaaccagtaggcttgattgcccaccagtatctttctatccccgtgctctcaaaagcatccctctgtaccatcagtcaggaaaagggccgatcttactggcttgtctgttgagagactgctttgtcaccattccttaccgctggattccagaccgattgatgggtgtccatacttgattcaccgtctctttgatcagggaacagtccgttcaacctcaatgattatcctccagccagagtcggactggccttgctaggtctctgtagattgcgtgagccgtcgaaaggttgagctccaagtgtagggcaaagcgggtacgtgaagaacaatcagggcaacgaatgattgggcaggcaagacgcgattgattgatttcaacgattgtgctttgtacaatggaatgccaccaccactacccggtggacaaacgttagggagatgctacaaatgcagagaaggcgagcgagagactataaaccccaatacagtatccccgaaatgtccaaaaagaaaaaagcaagctggtgttcttgcgagccgcgatagtgttgcagatagcgatctcgaggatgtgggtcgtgagcggttcgttattgatgtgattttggcaatgtgccaaaggtcgtgtgatggagcgatcgatcaccgcacgatggcgactccgacccggaacccgacctcgccggcctttggtgttatgtcgaggacttttgtcgaagcgacatcgcctagtatggaattgctttcaggctcgtccgagtcgatagtcgacgtcgagacgatcctatagttgctgagatccatggtctccaagctaggacggcggttcttgagcctatccattgacgtaggatcgctattggacgagccattggcggaacctgcgctcgaacgccttcgaccgaggagactgggaagcgggtccatgtcgctctcgctccccgcaggcgatgatggcaccagcgcagggactgcgggcatgctggagaacaagctcgaaacatcgataggagagatgggtcgaaccttgatgtgaggcgaaaagacatcgtcgtcgtccgacattgcctcttcctcttcttcctctgatgaagacatgtcctcgtcaatgtccatcatgaccgagtgcaagactgaatcgtgttcctcttcctcgttgttctccacgtgagactgccacaaagagctcgacctgataggcctggccgtcatctcgctgcccgagcatcccttgagcgaagcccggttgctccaagacctcctcatagccttgtcgacctgtcgactggcttccaggctctccaaccacttcctcctgccctgttccttttcgatcatgttgacgagcttttggattgagctcagacgggaagcgagcgcggctaggcgggacaccaggtcggcgtagacggctcgttgggagaagggcaaagtggcacatgcaggcaaggtggagagatgggcgagaggagaaacgctggatcccgatcgagatccatcgtgattccagaccgaggtggcgggggtggtaggtggggtagaatcgcagtccgagctcgagcaactggcatacgagtcgaccgagacggtggaagcaaaacctcgagcgagagcgccacatgattgcgaaggattagatgacgcatccaaagacgattgttgcaaagaagcgggtcgaccttgtccgttctggtgcaagatggcgtcgacctcgcgcttgatctcttcccattcctgcttcttggcgaccatctctccctgcaagctccacatcatgaagctcgatggcaatacgtctttgagtgcggtgaggacgtattgtcggaaggcgtcgaccaacaaggaacgagcttgacgacggtgaaccctagcgaggttgagaggaggaggcgcgggcttggaggcggaagcgacattgttcataatgggggagagcaaagcagagaggagcgccgagggactcctcaacccgctactgctactgcccgagctgctggtactgctggaagacccagacctggacggacccctcgagtggcttgcgggggtcgatccttgttgctgagcagcaaacgtgagctggacctgagccactacaccgtcgaggactgagcgacagccggcttcaatgggcaagaccatgatagagccgtcgatcaggaccacgatgatcctctgctccttggcattaaaagtgacttcgtcgacgatccctgggatccaggatgccttgtcaccgagcaaggcgttggagcattcgatgccctctttgacgcaggcgttgcggtgggtgaggagaaagggaggaagaggcaggctcttggaactggaaaagtcatgcgtggtcagtcgacttccatataaacgtgtgccaggatcgcaagtcaaactcacgtataaggagccgtggcaagagggagcgtgaagagaatagtaggaggagccgactgcctggcagtaggagcagggagtagtcggagaagcatgttgttcaagttggtttattccgtttgggcttgtgtagtgtcgcccgagtcggatatcgagatgttgatgatttcgaggactaggactaggactaggactggagatggagagagggatgcggggtataaggtggagagggaagggtgcgtgtcaaagatacgtgacgaatagcatcaagtacgagtcgaggtccgagtagtggtagaggttgagagtccaagaagtgtgtgagtgagagttgttgaagtgttcaacgggagccaagggttttcgagcgggaacgggaagttgtgggttggaggtatatatgccggaggtagagggagccggacgggaggcagtggtggaagcgaatgataaaaacagagtgtcgaatagcgtccgaaagaagtgcaggtaaaggtaaagtgaaggaaggatatagaaggaattgatcagatgagggatgattgaatggtatatatcaaaagggaatgacgaggcgagggactcacgtcgagaatggccgaagaggacgtgtaggtgtttgatagttggtgagtgagatgggacaagtgaatgagatcgagattagagagacaaggaggaatgtcgcgactcccgtgccgtttggcgcgtgggtgggtgactgaacacccgagatctgagacccgggacgaggcaaggggcaagggcgagggccaaagaccgagcgtcgatcaggtcggggtcaaggtgaggtgggtcgggtgggtcgaagacggcggcagagggagagggaagcgagatctctttgacgactcccgcgtgcgagctaagactgaaacccaattcttgagtcagacccgggcccggtaagcgaaagggccaggggattgagcgatgccgtaatattaattccgacgaaaggctccaacgcgcgcgcgagcgggaagtccgggccgatcgagttgcgagccggcggcgggacggcggaggcagcggtctgtctttgtccagctaggccaggggtaaagataggcggacaaaggttaacgtaggcttcgggggcggcctgaggctgaagtttaatcttattgcaagctttctaggactgcagaagaaagaaaagaaaggtgcaagagggcccgcatggttttgtacgtccagaccatcggacaagccgcgaccgaataagtttttttttcgtccggtataggtcgtgacgagtgtgatgatatcgacgtcgtaggtcatccggaagtcggggaatgagaaagaacaaagggtgcgcgatcggatcaatcgtcagcaattgagtctgcaagtgggttgtcacggtacccatcgtcacccaagggctgattgttccacaccagccgggggagatgacggtgcagcagcagggaaggaagactcacgcggatagtgcagaactgcccgagtgagacagctgggcacgcgcgcggagcggtgagggaaaggcgctgcggtggttttcgcggcgggatctttttggacctgcgcgcggaacaagacgacgcgtgatccggagaggacggtaaagtccagcggttttgcgatgacgggtagggtgagagcatcccagacaacgtagattgacgggtcgaccggtgaagcggtgcgacaggttttgacgagacgattgcgagcgaaatgaattgtaaaggaagtgattgcactgggatcagctttcacatttcccgtttcgtgaccggcgtttccaagggggtccccggcaggtgaccggaaggccggcgagtgagggacccccaaggggagtcgctatgtctctgctgactcacgttaatccgcgactactcctgaggtccagatcaattggtccgacgagtaatatagggcggcaagggcaaggggatatgatgacgatttaattaagatgaaatcggtctgctcggccttatggcacctcgagggagattgaccgccaagctaatcgtatgatgagtaacgcgtcggacaggtatgtcggctaatctcggtgtcgatagagtacgatgactgatctgcggaatgccacaaagagagggtcggtcgatgcttgtgatgtgccgatccagtagatggaaagatcccgtcgaatggctgtcctggtgcacgatgaaacgatgagtagacgaaacgaagcgaaagacgtcgaaggaatcgaaaaggcaacgttgcaaggttggtcaccagaaagattcttgagagtcaaggtattcgtctgtcgcagagtaatatatgccaccccgcaggaatgaaaagaacattcttccctggcgatcggaggagagagggcgggaggtatcgaacacgatcgtccgtgtgcaggtagtttccgggttcgttcgatttcccccctccccacacgatagcagcacaagaaagatctcagacctgctcggtgaactggacactgaacttttcccctccacatctgaaccatgattgtcaagggacggaggcaacaacgccttgttcgagtctgtgcccctgccagatcgttgtatcagcttcctctccccttcgccctgttcacgccctgacgttgaccgagaccggatcgatggcgatctctcgctgacgtcgagatgcgcatcatctcggtctagctgagctattctcaaggacgagaggaacggagaggtgtcgacggagtcgtgcaaagggaaaagcctacgacgttgtccctggtctgtagcaaaccttggaccggttgttaaccctctttgaccggccgcaatcgtttggtaggttccagcgatagccgcagatgtcatcgagaggcatgcaattggagggcagatcgcagagtcgctggatccgggctcgccatcgtcgatatgggtcgcgcgcgggtgactgccagcgaaatggcgagtcgccggacgcctcgaagcgccttcacaatcagccaccgccttgctctcgcgagctttcacccctggcccgcactcgtaccgcccagtacatcatggctgtcgctacacggaagtagaatatctacgtttgggcaacgatcagggaagaggtacggaaaaggatcgcctctgcgtcctggaatcagaggctcaaactcaaaacggattgtcgtccctgttgtcggacagaaattcaagatccggaatgagcaccaggacccactcgttccgatagactccactactgcctccatgatcacgacgcaagcatccgtcagtggacgatgtctggcacgttcgagttcgaacatcaaaagccttgccgccttctctacaaagtttagacccggggcgaggtcggatccgtaaagtaaactttcgtttgcgagcccgcgtaacgtggcgatatgtgcattccgaggcatccgtgataaggaagatgttcgttacaaggcgttcgtgtcgaggcacgcgagatatcaggatcagggaccgctattcggatacatcggaaactggttgtcgttatggggagaacagagtgaggtcgagcgtggaagctcatttgcgttcgggtctttgcggaagacccaaattcctcgtcgtccgtttgatcggtgcggatgttgggcccggtcgacgtttgggtctttgtagctcgggttcaggttctggcacgggtttgaccggcactcgcactccctcttcggtctctactattggtagcttccttctggccgaacgcaacgttctaccttcgggtacttctgcgttcgtgcggctgtccgggtcgggcacggcccgtacgttctcggctgccgccgtcccaggttcacgggcacgtcccgcgggtttcgtcgtagtcttcactttcgctcccgaagtggcccgggaagtctcgaccggtttcctcttcggcggcgctgcacgcgccagtttcgtttcatgcaaagactccgggggctggtccaccttgcgtactttgggtcgacgtgcttcggcagcagtgtcgacccctttcctcttgcgtggggtgactttccctccaactggaaaggctccctgagcggaacccacgcctgactcgtctcgaacagccgtggccccggcggacgggacggtccgagcggccggcattactgtgcccgtatactcgatgccgtccatatcctccgctgtctcgtccacgacctcgatgggcgatgactttaggccgagtcgatcaagtcccaccgaagattgtgccaagatggcctctcttcccacagcgggtgcctcgaccgagtgagacccgatccgtacgggcgcattggcgggcggaagggtcgtaacgggttgagacggccctgctgctctcaagctggcacggctgggaagcgtagggataccgatcgccaaaggattccggacgatcataggggcggcccgagctgcggtagtgcttgcactagctgacaccctgactggccttgatgcgtcgactgctcggagacgagtcgggttctgttccgctcgcatagctctggacttcggagctgtatcgaaagtttgaggtaatccggcggatttgctcctctcgcctgaccctgtccgacctacgagaccatccagaggcgcctgggttgtccctctcttatccctggctttaaccaccttgccagtggttccggtcagtttgttcgctgcgagtttctcggcctggactttgaacttggattcaccatccccaaccttcttgccaggtctcgccgccggaccgtcgtacaacgccttggcctcatgtaccgtctgacgtagagtcctcggcgtccccagggagaattcgagcacgttgtctagcacggactttcgagacttcttgcgcggtcggactggtgtggaagaagaggtctctggcagaaccgttcggaagccaccaggaggcggtgggggagaaggccgggtagagcctctggagccatttctattttgttccacatcggccgaccagcgcgaccgccagaacgatcgcaacctttcgaaagcggtcaagatcggtacgactgtcaagcagagaacgagctggaggagatattgcccgatgagcatgaggagggacgtcgagaggtcgaccgtccgggtatgcctcttcagtcgtggctgtaggaagcggtcgtaaatatagggaagggtctgttcgacggtgaccacaggatcgttgaccgtatgtcagctgtcagattggctctggtctcgtcagttcgaccagcgacttacggaagaacgaggtatgctgagagcgagcaggaacactatcttgacctggttgtagaaaggcatgaccataccgaacgtgtgatctgtgaatctctcaacgtagctgaagaggatctgaaaagacaagaaaggagcattagtgccactggggcgaaaggcagccgagacgagctagactcacccaaacgatccaagacttcaagagtcttctccattgatctcgcttgagtgtgctcatgcgagtcctctgtggcaccgccggtgtcgagctgatatcctcgccatcctcatccactgctttgacttttgacttgcgtaaagcaggcttcttgatggtcttgagtgtatctaccagctggagcgacaacctgttgatgtcgcattgaggcctgtagcatcagcttcccaaggccggatcacgcgggtagtgcaggtcgttccttaccacgtcagcttcagcagcaagactgtcaacggcatatccctaagagcttctggtacataatttggatcgagatgtggacgacctgtgtaccgtgcaaggtcgagtagcctagatggtgatcatgaacaactcctacttgttatcgatcctgcggtcttgtaccttttgttacggactagccgcccgagtcgaaatcgtaaacaaagcggacattgacacgattctagtcaaaggctgtcactcacaacctgccatgtccgtctgttttccggggtgtcgtttcacatctacctctacttgcgctcaccgccacgcacggattcatcttctactcgtcctctcaacgtgttgcttaacgagatgacatgtgtgtgaagataccatcgcagtcgcccggatcgttcaagtcgtatgcaggaggactttcagacttgtactgggcattcccacccaacagctggttgcacatcaactcaactgattgcttttccagcaacatttcctccactgtcgttgtttgtccctcatcagtatctctgtccggactgcaacatggtactgtgtgtcaagagtcatctgggtacatggtatacccatgtgtgacttggttggccccagcgtttgcagtccgtcaggtgaaagtacgacacactcgctcggttgacaacgtcacaccaggactttcccatgcatgccctcgacatcaccttccatgagcttgaagcagaccgtgtcagagatgcatgggaatcaaaagaacctcccgtgtatggctggattgttttatggaaaggatgccgtgatctgattgcaccggtactcgacgactcgtcgctgcttggggtgactctctcataaagcgtcggcaaattcgattcgggtcaccccgctcaccctcttcggctacctcatcgcccaagactttcaagacgtcgtcgcagtcgaccactgctctggaagtctacgtctggtcgacggctgaccctgccacagcgctggcgacaagtgcacggcaacttgtcgcgtacctgtcttcatgcgatacatacagcaagttgtacaggaagtcacttgggacgcacctccgaatcccagatgctttctcgcacgttgctatagttcacatcttcagctcggccccttgcctgcgccgactcccgcggtgcctcactgtctgattcgatcgagaccatgaacgtcccaggcgtacagtccggcagggtcaccccatccgacgacacaatcgcatcacctccgaagatccacaccgggtcgattccgttgcctcaatcggccactacaaatgcatcatcttgtctctactatggtgtcgaaacccgcgaaacttgcggggtcgagtaggcagatgtgagacccttcctatcggcgagcggagattctggcgctgctgggttgaccaactgcatctgggatttccgggcaagatttcgaatgtcactcgagtacgtgcaacgagcgatcagtacgaaccgtttcgcgactctacgcagtcatcaccttgaggagaaggcacagggtgatcgttctgatgatcagcagcagggtcaagtgcgctgcccgcttgtaagacatgaaacttgcgccagtactttcgcaatatcggcatcgccagggtcgaatcttccgcccaatctccgcacctgatgatccgtacagaaccacaccacatcacatcaaacggaacgaacgaaacctgcccaaccaatgaccccgcataaactcgatatgaacatctcttgtttacaaagggggggatccaccgttctcaggtaggtgtgttggtgcgtgtggtgagagggagaagggagggtgggttccgatagtcaagggggggaaaacaagcttgaaggctacgtttactcctcgtcggcctcgatgacggcggtctcgagtccctgcaaatacgaccaggacgacagataaaaatcagcacgactgatccactgggagtgtgatcaccgacgaccacgcggacccaccttgaagctggtgacaccctcgacgtggtgagccaagacgtaaagcttctccttggcaccctcgtcgtcgtttcgcttcctctccaacctgaccctgatcctgtgagggggggatcggacaccacgggcccaaacggcctggttgagaccgggggtgattcggacgtcctggacacccatcgacttttgagcaaactcgacgatcgacttgatggccttgggagcccctggtagcgagcgggggtggtggatagatcagctcgtgcaatttcgagctgtcaaacgatatgacctaggacgtactcttcttgaaggaagaaccgtggacccgcttgtgcaagtgaacggtgtattcacgggtgacgacgtcgttcagggccgacctggtcttctgggtctgtgaaaggggccgggtaaggagtcgtgcgaggtcagtacgaggacggtgcgcaaacgggcggatcaagagcgagtgagcgagtgaattagggtgtggatgtcaggccaagcggattcaaacaagggctcgaggctctgggttctgggctagaagcgggtttcgaggtggggtcgtgggtccgagggcgagtccgtgtccgtccgagcgtctcatccagtggaggggtacgaccccgtgttcgatagaccgtgctattctcctgtttatcactcggtcgattcgaatcccacgtggtctagtcggctcgaatcattcccaaaaagtccaggtcgaggtagacgcccatccttcgtgcccgaacccggtccgatccgtatcacgctggagccgaggaccgatacatcagacgagctgacatgtcagctccccctgtccctcgcgattccggggcgtctcgacgaacaggatcggacctgctcatgccgtaaggtggaccgaggatggtgatggtctgtcgatgtgtatgttgacattcccagtagaccattacgggacctctggtgggggagatcgaccggggtccaaatcggtctggaccgtgactatagtctataatttgtcgtaggtagatgtaccgtgccgtcatatcatgtcgattctaagtcgagttgcgagcgtgttcatccccggacacgactcgccagatatcggtgacggcttgatgatgatgatgatgctcccctcctcgacccttccggcatcccaaggcagctgtagctgaagatccatatcacgcgggggaaggtccagcctggttgatgtcctcgttgtcgatcgttcgtcgtgcttgcgagtaatccagtccattccagtccgatccaatccaatccagcctaacccagcccagtccgtaggaccaccccgagttctccccaaccgaatctttctttctttctctttcactctctctgcctatccctcttcgttgatccgtagccgacatccacatccacatccccgctctttctgtctctttccgtctcctctcctttgcacgtccatcgactaaccttcttgtcggtacgagcctgtatatcgacgaggaggatcgactggacgtcagtctcttttctacgaattacgacgacggcgacgaggacgacgactgaccatctttgatccgggattcgttagcgagctgtcgaaaagaggagggtggggtcttgaagagaggtcgggggtatcgaaaacgagcaacaagatcagccaaaagagggagggcgatttggacggtgtgtgtgtagcggttctgagctgacctcgaggacgaccgacgaacgggctctgggggtggattcgagacccggggcaagggagcagcagggataggtcgagccggggcagtgaacgttcagacggtgagagcgtaccaggggggtcgagcaggtccgtggctggctaggagcggggggtcaagtgggtgaataaagcggtaagcgcatccagaggtgacaggacaagcgagtcatttgcgctttgatttggtcaacagcgcgagagagagtgagacgaggtggaggtcgccgagtgatggaagagctgagactttgagtgcttggcgaccttgacggcgacccatttgatcccaaccccttccctcgacccttgacgcgtcggggatatcaccgatgatccagcgatcagcatggggtggacacacgcggacataccgaggtttttcgagcttgtgaagaaagacggacattgatcatatccctttcctttctctctctcgacatgtccgtccacgacctcccgagcgaccagctctgaaatcgacatcgacctcgaatcatcatcaaccccccagatcccccctcaccgtcgtgagtcgataaaagcaggtgggggggcgatacaccgatggagctgcagagctgatgagttgaatatcacgatcgtgttataaagggggatgggagtccgaggtgtctgcgattgggatccacccctgatctttcgctcggtgctggagaaataaacttgtggggagaaatcgagatggtagcgagcgcgcggcatgaaagggaccagcgagagaatgagggctgggctgggggggaaggagacggaaagaggggaaagtgaccgcgcgggaagagccgacagcgaagcagatcgcggtggagcgggaaagattgattcgaaaggccaagcgagcgagccaaggaaagatcgcccatttgccttgctcgccccaggtcgccgcccctcgccctttgatctccgtcgcacgaattcccccgaaatcgctgttcctaccaaagacacgttgcgcgattgcaacgtcgggtcggactggcagcaaacgccacgaggcgcggggcgactcagtgtgccgtaaatttcgatcccaaacaccatgtgcgaattcgattgagtagcggaacgctgtcgtgcactagtgccgaggtgcgaaagtatccaacgcgatgaatccgcggatcatcgccatcaattgttcgatggcatcgtgttcggtgttgatcggggcagtcaccgaaccaaccatagaatcgagatttcattcggaccgggacgcccccaatgcctttttatttccacctcacccagtcttgacttttctgatcgttatcacgccatttacatccgatcttgaacatttgattccggcgatcccgaataatcattcccaagtgcgtatcagaagcaaaagagagaggcaaagcagagattgagtaaagagataagcaatcagctatgcgaactggcatcgacaccgtcattcagcatcagcatagatagacacagacaacgcgttggtacccaaactacagcctcgcccatatccgacaaagcaggtctgcttcgcaacgctctccaccagaacgaaccttgaacgaccatgacgacctccacctcgacctacccccgaccccagggcgatcttccgctcccactcacctttctacctgcacctacccgccgagcgctgatcatcggtgtcaacaagcttgcagctgcaagggcattcacctttctagactcttccttcggagtcgtcctgctcggcgataggcacgaggcatgcgacgaactgcgatggagggaggaacatggcgaggtcgagtttcacgccgatgccgacgtgtcgtccgatcgatgggaggacgaaaccgacgtcgacgcctggacccaactgatctcgtcgatcgactcggtggacatggtcgtcgtcgccgataccatcctcacccccacctgctcgacaccacgcccgctcctctcggcccgatccatctttctcgcttgtacccgactccacctacctatcaataccacggaccacccggcatggagcacctttactttcccctcggtggccaagttcccgggaaaagaaccgggtaccaggagtaacctccagatcgccgtcagtaccaacggcaagggttgtagattggcagggaggatcaggagggaggtcgtaggcaggctacccagggacgtcggagcggcggttgataatgtcggcatcctgagagctcgggtacgagctagctctccgggctcggggtcagtcaggtcgggttcgtgtacccgcgggcgacgacaagacagtgcggctgcgaaccccgttcgaactcctaatggcaggaccgattcgggtttcctgggcgacgatgacgatgtgtcgctcttttccggatctggacctttgaactcgccggtaccccagctggagagcccggccttgtcacggacgtcgtcctcgaagagcttgttccaccctcaggtccagctcgtcactcaaatgcaccagcatcaccaccaacagcaggttcaacaacaacagcagcagcagcagcagcaaccgaaacagatgaacgatcaataccccttcccgagcgtgccggtcgcgctgcccatctcgcccgcgatcaccgccaagacggcgccttcctcagctagctcgacccagatggatgaggaggatcaccagttgaggagaatgcgttgggtcagccagatctcggagtactggagcatcgagtacctggcgaggatgggggaagaagaaatggcgaggtgtctcgagatgtggaccgagggcggagaggcggaccgagtcgacgtttcggtcccggggcgcaacgaaggtggcgctcgccgtcaggttgacaatgaaactgcccctcgaggtagatcatcgacctcgggcggcccagacgacgtgacgccgaccggagaaacgggactcgaattgaccccgcgtcatggactcgctattgacgcaccacctcgtgcccctgggccgaggcggggcaagatcctccttctcggatcaggaccaggacacccttcattgctcaccgtcgccgcacaccaagcactcttgaccgcgacgctcatcctatctgacaagctcgtacccgccgaaatcctcgccttgatccccaagacgacgacgttgcacattgctaaaaagtttccgggcaacgccgagggagcacagaatgagatgatgcagctcgcgctcgaaggcgcattgaagggcgagactgtggtcaggctcaagcagggcgatccgttcgtatacggtcgaggaggggaagaagtcttgttcttcagggaacacgggttcgaatccgtcgtcgtgcccgggatctcgtcctccatcgccggaccgctcatgatgggcattcccgtcactcaacgtggagtcgccgatagcatggtcctgtgcaccggcgtcggccgaaagggcaaggccgtgcaactccctggatacgtgagaggacgcacgttgattgtccttatgggcgtggcgaggatccaccaggtcctgcaagtgttgaccaacaggagcttgaacgacgatcccgtcgcgagggagacgaccggatggcgcgacggggacgctttccctccgcacttgcccatcgccatcattgaacgcgcatcgagccatgatcagaggatggtggcttcaacgctggacaagatcgaggatgcgctcgagcgatcgggcgagcagcgaccgcctgggatgatgattatcggatgggctgcgctcgccctcgaaggagagggagaggtcacggtgcttgacgacgatgaggatactcccgatctcgacgcccgagataaagccagggtcgataggtggctcggaggcaaggattatatcctgaaagacgggctgagggaggagtgggcacagttcttgccacctggtgctgtcaccgaggtgcagtgagagctactcacaatggagacagacgaaagggaagcggcaatcatgatacccgttgtacagtagcatataacatctgcataggttcaatctgtaaggcatctgatggctcgattcagcaacattgccatgcgtacaaaagtgtgacatgttcgttatcgactcgggtcgatttggcactctcctattcaacctaccgtaagcgctgccggcatttccaaattgtacacaaacggctacacgcgcgaccttgagaggtgcgcgatctcggggagattctagcttccaagttccaagtcgcgcaattcaacatttcagttgcatcagttggatgaggacatctcgatatcgagaagctcgactgtttcatacggacactgccgagctagcatacaagtctagcaagtctgtgcttcatgactgcgccttcttcataaatgctcaacaatctagtccggatctgcagacgatgatcttcgggttgcacgagtacaaagagatagcccttttatcggacttgcttcgtcagaggacctgcagaaggttcagtcaataaagcctactggcggcaggcgtctatagtagtgacagcacgttgtataattcaggattctcaagacttcatacacactcaaaccaagtcgtcgacattacgaggcatcatggtcagtcgcacaagagcaggcaacatagcacgccagtccagcgtccagacggtcgaggacgattcggatgtcgacatgattactcgaacaaccaacagtcgtagcagtcggtccaaatcaagtcctcttcggcaccgacgagattcgtcagtcatcgaggtagcacgcccagggcaagcctcgagctcgaagatgcaaacccgaaatgctatcacgatcgaggaaccttcaacgaggttcatactcgatggtgtcgagctccggaagctgtctgaggaggagaaggctcaataccacaacgaaggtttcctaccgcccgtaccaggccaacctgatttgccgggcgaggattatgcgctcaagcgaagtaccgcgaccgtccctaggaagccgaggtggaagacgatagccgacacttccgaagctgaggatgaagatgaaatgcccctaccgaaacgcgctcggaacaaggccaattatcatgaccctgggaaccatgccgataatgtcaaggatggcgactttgacgagtccatccacacgatatcctcgggagaggacgaagccgatctcgagtctgaaagcgagggcgacgagtggaacaaacggcctccaaccagaccccagaggagttcgaggcggcgaggggtagcagaccctgacgccgagactatcgacgtgagtaccagggttagcttgttcggatcctgcgactgaagtgcatgtttgtggtagtctggctccgatgtcactcctgtcaaccaccgccggacaaaggggaagcagactcctactgagatttcttccgatggggacgatttcgatgaaattctggacgattcgcaagaggacgaaggtggtctggagctgacaagagtgcatcgctcgacgtgccacaagtgtaacatgaggccggcgcaagacatgttccgcgctttggtacagaagaggagcaagaaaggctaccgcaagaaggtcaaagtggacgaccttttgatggatgatgatgctctcatcgacaaattaggtggatggaccgagtgccgacggtgctgcgttagcctgcactggggatgcttggccgcaaacttccgccatgaattgctagcccaagataagaagctagatttcaacgacagacacatgaagtcgggtcgactccgtttggatcacaaactggaaatcgactgcccgcactgcgctgcgccaatcacgaaaaactgttacgtctgttggaacgatactgtaccgcacgacaagaaggacggagaaagtgtcgacttggaaggcaaaggtgtagagagggatattaatgacactaatgagggtgacaagaatttgctcttccgatgtgccggttgccatcgagctgcgcattaccagcaccgtacgtatcctcactttccagaagaggactatcacatcgcattttattcacgctcgcctcgctaccagttcctagcctggatcctgagaagccggacccatcgctgtccactcttgctgcgcaataccaatcaggcaaaccgaaacaagcttggcgatgcgaagactgtcgtcgactaccgcacggcatcgaatacgttagtatacttcccagctgcactcatctttgctcctcgctgattgacatgcgcttgcataagattatcgcatggcggtatagtcctcccgaggctaaggacgacaagtatgacgaagatgtacatctggtcaatcaacatctccggcgcgaatacttgctcaagtttaagggttggggatttcgacatgtgagtacggaccgcttcgaaatcgacgtcacgacaagcagctcaatgctccgccaacctgaaggctacatgggtgtctcacgactatgtcgcccaaatagcgaatttccagaccaggaatttcctggatcaaggcagtcggttgagaattctgactgaaacagatttggccaacggagtcgatgagcttgcagatgatgaggatgcagtcttgcaagttgatgcagatgcggatcagatcgacggggacgatggacgtccgcgagcaaaaccggatgccgatcgtgaactgcctcgctcgtggagcacaccagatcgtattctcgatctatggttcttgaccgacaaacctgtcaagtcggcgaaagccaagcagaatcgtgtagattcgcctgagcctgagcccgagcctgaacctcgggacgtgcgctacggcttcaccaaaccggccgattccaatctgatacacatcgatgattgggaacgccggaatagaaaggctctcggccctgacgatgctgaggagctcgtctcgcgtatcggtctcgtttatgtcaagtggcaagatctacaatatgaagctgcaacggaggatacaccgatagcttcgacatccccgtactatccggctttcctagcggcttttcgcagatatctttatgcacgaacgatcaaaattcccatcctgacgaaggctgaagcaaaggctagagacgcacgtaagatcgatggctataatcgactcatgggtgtccaaccggattgtgtaaaggatggggtacgtacatcagctatgtctccggcaagatcgcatagcactgactagctttgaatgcagacgttgatgcgcttccaggtcagccctaagtggttgcagcctcattgagaagtgaattgactttagctggtcgcagatcgatggcctggactggttgatgaacaagtggtacaatctcacatccgtgatcctggccgatgatatgggcttgggcaagactgtgcaaattgcggcctttctcgggctgttgggctcggcagaatggaatgtctacccagcactcgtcgtggtacccaacagtactcttcagagtaggtgtcgaccatcttactgttggagtacgtttatactgagaaaacgggcatacctcctttttccgttctgattagactggttgagggaattcgccaagtgggtgcctcatctacgcgtcgttccagttcaaggatccaaggcttcgcgagacatcattcgcaagtacgaattgttctcacccaaaggagatctgaaatggcaagttccgtacttcgtgcgtccgctcgtcaatcgggaaaaagactaagaaatggcgggcatcctcagtcacgtcgtgctggcgacgtacgaaatcgtcacatcgcagaaagacttctcgatcctcatgaataaagtaccgaggtgggagtgcctcgttgtggagtaagtcgtggccaggtgtccaacgttgccactacgtgctgaaggcaacatcattctttgcgtcctttagtgaggcgtctcgacgtacgttagcttgcgtattcatcgatcacatcgtgcattgacgtacttgcacgttattcctgcacattgcagttaaaagccaaagcaatctgatcgtcaggaagttgactgcccttcaaccggtacataagatcctgctcacgggaaccccgctgaacaatacggtcagggagctactcaacctgatgtatttcttagacccagaagaatggaagaatcttgacgagctggaaaagcattacgcagacatgaccgaggagttggccaaggagttgcgagacaagattgccccatacatgctacgtaggagaaaagaagatgtattggatctgccacccaaggtaagccaactgatccgctatcgatggatcgtaagatccctaaatctgatcgcgctcttgactacagaacgaaatcatcgtaccgttgacaatgcgacctttgcaacgaaacgtgtacaagtcgatcttggagaagaatgccgatctcatgcaagcattggctcaagccacgacccgagggggtcctccactcaaagtgaaggcgtgtcacaatatcttgatgcagttgaggaagttagtcattatcggagacacgtctcaggagtctaactaacgtccacgctattcgcaaggtgtctgcaacatccgttcttgaacacgcccgagctagaagatcgaactttgggtagcaaggagactcatcaagctttaatagatgcctcggggaagttgaccttcctgaggacattgctaccgaaactcaaagcaaaaggccatcgcatcttgctcttcagtcaggtatgtctcgcaagcaagagctgaaatcaggacccaagggctaaccaacatgtcccggaaaatccgctagttcgtcatagcattgaatatcagtgagacaaacgaacgtgataagtcgaaccatcgctgacatacagaatcttgtcagtcgaggatttctgtgacggtgaaggatatcgcaccttacgattggtcagtcttaaacgctcaggtcccgcaagttcttctgctaaagattgtcgtcttatattcctaggatggaaccaccccgcaagatcagcgtcaaagggatattgataccttcaatgctcccgactcggagcatttcctctacctcatctcgacacgtgcaggcggcatgggtatcaatcttgcaacagccgacaccggtcagtatccgtgtcgaagtcgttcaaatccagccctgctaatatgacggcggtgaattctcagtcattgtgcacgacttggatttcaacccgcatcaggtaagcatgatttcggcatacatgctccaaggttttcacggactgaatttttgtctcttcatataggatatgcaagtgagtcaagcgacaatttctgattctacatttgcgactcgaattttgacattgccatggaaggctatcgctcgagcttaccgttatggacagaaaaacaaggtcttagtcatgcgcttcatgacgacgccgaccgttgaaggtgattcatgagtgtgaccttcgcttgctcagctacggtatgaactgatcgtgttttcgctcatctcctcaaagagcgcatgatgcagattgccaagaaaaagcttgtcctggatcacctgattgttagtcgccgcgagatagtccatattgcgcagacgctcaaagtcgttctgtgtgtaggtccaggccaaggattctgacagtagcgacaacattgcaagcgttctccttgatggtgctcgggctattttagacggcacagatatcgacgacaagttatacgacgaacaggctgttgaagatctaatcgtcaagctcgagactggagaagaagagaagagcaaagatgacagcggattcacatttgcgccagtcttcgacaacaagaagggcaggttggaggctctgagtacgaacgatactgctccgccagaagaccctgacttctgggccaacgtggtcaaacgcgccaacgaagacagacagaaaagagagaccgaggagcacggtcggggaaagcgaaagcgtgccaccgctgtaagctgccgacatagataccttactttaacgtcagccttactcattgacttgaaacgcccgacaggctaacgccgccaagcctatcgacattgatgacccggaacaatctctcgagaaagtcagcagctccaagggcaaacaaaaacagaaacagaaagacaacgatagcgagggttcggtatatgaattcaaagataacgaagcggactcagacgtggaaattgatgcaagggaagtggcgagagaaatgcaggacgagatgaatcccggtccatccggaacctcgcgcaagggactcctcaacatacctacaccttcgttactgaagaagccaacaaggccaccacatcgtcgacgactttccgcaaagggagaagaattgcgtacgctcggagacgcaatgggtctcgggttctaccatgtcaaccgggtttacgatctcgcgaagagattcggactgtacagcaacgacaagctcgataaaatgatgtacgggatcacggatccggccaaatcgggcgacgagcgggtcgcggagtatgccaaagccgcaacggtgatcgacaaccaccttgaaatccagggtcaaccccgagtttgcggatcagccaagacgatagcggaagttcgcgtcatacttcaacgaactagtgaacccatcaagaggccctccaatgatttaaacatagctgggccttcctcgcttgttccttccttaaagtcagctccacctgcgccgacttgtcccagttgtcaagtaagtcacgtctgcaacctgccaagaagcttggtaggcaggcaaatgaaatgacaccaccttccttctcagggttcactaatgccacatggcgcttgcttccgttgcatcgctggaatacaatcccaaatgagggacatcgaaaggagcacggaagacaatgaagaagacaaggtgagcacgatttcaggggtgttgaaggttgagctaaagttctttccatcctctcagagagcggctctggatcagttagagggaatgctagccacaatccggtcgcagccatggccagtatagctgtgaggaagaggacgtgatgggcgggtgtacgagggaagatccggttgtatccttacgtgatttacatgacccggtgcgacgagctttaatgtagacgatgaacgagaggattctctcccgctcggtcaagctgcgggcggcttgccgagtatcttgcgtgttgtactctgtttccaggcgataggtttcggaaccgactcgttatctagaaagtccggctcgaggttgttgacaatctcgatcgcgtatgcccgatcgagcaaaattcccaagaggagcacgacgtcatatgagattcctccaagatatacatcgtgcctccaagcttctcgatgctatccgaacgaaaccgagcttgacagctgtcgccacaagacacatcaagttaccatctagttctagtccgggtggctatggctccggctgcacaacccggcctgcgccggataggcggaccacctcgtaaaatcgcacctcccggtacaagcatccgcaaatccacaaatggacgaatgactgccgcaggatccacttcaactgcgggtccgtcagctccggctacatcaagtccatcaaaatcgagcccagcgaagcctcctcagactagctcgaagagagtgtcgctccggccaaatccctctctgatctcgcagctagagttcgaggaagaagaggatgatgactgggatgaagtcgctttaccacaagggcacgagccgatatctagggatttcgcttcttctccggccattggcaacagctctcgggcagcttcgagagctcttacggtcacagacgacgagacggcgacagaccgaacggccacggcgactgagggggaagatgaagacgacaaagatcatacagatttgatggcggcttatggatatgacttcaacgcagaggaaaaagacaacgccgctgccgttcttggaggcggggatatcgaaattagtctcggggctcgggacggtttgaccgaggagcagcgcaaagctcaagaagagctagcaaacagaaagttcgtcgagagcgtgttgagcgaagcagggcatccaaggactgattccacgatcacttaatcgacaggaagcccctgacagcgagagatcgtgcactgaggctagaggcgcacaagctgcacatcatgtgtttgctcgcaaacacctcaattcgtaacaaatggtgttgcgacgacctgctcaaggtacggctcgaacctaaactacgtagtagcgaaactggagctcacctcggctcatatgttatcgctgacagtcgaggctgctatccttgacaccacatgcgttacatgcagcctttcacatacctccttctcgttaccccgatgccatgcagagggcgaggatgttccagacggcactgcaagatctagccacctggtgggcgaacgattatttcgaaatatcagacactaccatcggtgtgaagactcgaggatgggacgaagtcatggaaatcgttgaacggttacctcgcctggttcagaatgccggcctgcagattgtcgttgatggggaagacaataatctcgtcgccgcgctcaaggaaggcaaagtgcgcgccgtcgaaagactggatcaagaagtggtcgaggagttccaaggagcccttggtcctggtggggaacggatacgcacggtcaattcgttcatgaaaaaggtactacaggcgcgaggcggacgggacacatctgctcaacttttcgtggccctctgccgttcccttggactaggcgcaagactcgtcgtcagtcttcaaccggtccaatggaaggcggacaaacagccggtccccaagccgtctggtagtcgcaaatcaacgacggctccggaggagaattctgcctctgcaaaacagccgaaagtctcaggtcgcactaagggcaagcagacgcgtcgcaaaggcaaaatgcccgaaaagacgattagcgaggaggaagaagaagacgatatggaggaggttcaagtgataaccggaacggctcctattgatggtcccggtcctggcacgagtgctttgcgtcgcgcttctacaaaagccgcatcgaccgaaccaatcgtgatatctgatactgagagtcatgcaacaaacgcgtcaaacaagagcaagaagctgaatatcgggcgtggtggagaaatgaacccaatgaagaaggaacgcgcagactattacaaactcagcaaatccaaaggtcagaaacttggtggaccggcaaaatccaaaaggcgcaaagaagaaggtagagatctgttcgccgcttacaagtgtgctgcccgaggtcgctgatagcacggaacgctcattcagatctaacgcgctatcctcccgtgttttgggcggaggtttattcaagatctgaacaaaaatggatcccggtcgatcctgtcaaaggcgtcatcaagagaaagaaggactttgagccatcgagcgagagcgggccaattcgtatgctatatgttgttgcgtttgaagaaggtgagtcagcgaggcacttccgacgaggcgggatcctctttttaaatctgttcatgctgcagatggatatgcgcgggaagtaacggtcagatatgctcgcaacttcgcggcgaaaacgatgaaattacgggtcccggtcaaaaaagatcaagaagattggtggggcagggtcatgcgcatgttggagcgaccttatcgattggtcagtcggggtgaaagggttggtgctgattcgacgttgcttaacatggcgtttaatttctacaatcagcatcgagacgatatcgaagacgccgaattggaaatgagtcaagtatcagagggcatgcctatgatgatggctggattcaaggatcacccattgtaagttgtgccattcgacccagattagacaggctgtctgaccccgcctggtcggtcttgtttatgtttggcaggtatgttctcgaacggcatctcaagcgggaagaagtcatcataccaaagcgagaagtaggacgattcaaaggtgaagctgtatataggaggagcaatgtaacttcgtgtaagactccagagaattggatgcggataggacgaatcgtcaaggcaggacaagaacctctcaagtgggtcaagcaacgggctgtaacgcttgacaggcggcgcgcacaggaactggcgaatcaggaagggaaagatcctattcaacagggtctttatgcagagtggcagaccgagctgttcagaccgccaccgatcaaagacgtcagtagtagttttcgaggtgtctcgcccgtaggcaaaactgaatcgatatatgatcacgtcagggcaagatccccaagaacgcctttggtaatctggatctctacactccgaccatgttaccggagggtgctgtgcatctaccttgtgagctccacttcgaaaccggtactttcgtctgctttgagcctgatacatttgacctttactcaccagacaagggcattgccaaagtggccaagcaacttggagttgattatgcagagacctgtactggattcgagttcaagaaacagcgagctataccagtcttgacaggtattgctgttgccgaggagtacgaaacgttggtgcttgaggtcagccatcccttgctctcttgctgtgattacgtatactgagcgatcagtctcgaaacagaactattggaagtctgctgcggcagcggaagagagggctctgaacaagaaacaacaacgagctttggagagatggttcaaactgatcaacgggatcaaaatcaggaagcgagtccaggcgcagtatggcgaagccagtaccggtggaatacaggttagtctcaaatctggatgttcggagcacggatgttcaaagaaaatttgcccaaaaacagttgccccgatcggctccgcaagcaaacaatgttgcgaatgatcgggactcggtggctcaagacgcctcgcttaccactcatgactcgactgcgaacgagatcgagcggccccgtgcaccggcgcctacgccatcccgatctatcacgatcaagctcaacgtcggcaacaagaacaaccaagatggtacaccatacaccgacgttgaaccggaacagcaagtagacagtcagagcgatttcgaggacgtgaccgatgtggtcaagcaaaaggtcgaggtggagataccggccggagacccggtagaggtggatcctccgacgagccgaagacctcggcgcgctgcagcagtgcaagcgaagaaaatgttgaaagccgaagacgacggtgaagacgctgatgacgagtatcgatcgtcgagaccggctgtcaggaaatcgatgagagtcaccagatcgagcgctcggtagagggcaaagatgaagcagtgaattggtcgtgatgtctctggccgggggatgctcggcgacacagcgctcgtgccacagaacattataatgtatttgtctatgaaaattcatcatcgcggtattcggaacaaagctcgtaatggcagtacttaagatcatgattcgggcggccgcaacagaacgtagcttccgtcaggtttccggattgcaatggccgtgtcgtctgaaatctccttctgatccctctacaaaagatgatggcggtcttattgtcttgatgcacctcccaaactctgtacctgtacagtagacttatttgtccttgtgattggtaataatatgaaggggtgtaatcaaagtcacgttcaagacccttctccaaatcgagaggaggtctgcgaaccggctgcaagctgcaagacgcttggtcacaccttttcatgaggcacccgagctgaaacgtgccgtttttttcgccagaaatcgcccgaaaaggacttagattcgctgtggaacgcacttcaacagatcggacatcgagcttgcccgatctccacaacgagagcgcaagatcgcctcgatcgactgatcagtggtgcagtggtaaaccagcttcccccttgtgacttgcgcgcaaatcgtctgtgcgattttcgcctggcgagttgaagcaaaccttctttatcgggcgccccgcgagaggacggtcgaaacatcctttggtccctttgaatatttgtagatcaaatcttttggccacgtagccggatcacaaaggagctttccaccacagcctttcgggtcgaaaagggacaatccgtcctagaacgatttggaaaagccacacagaagtacagaagaaaacgattcaatctgtcgctgaatgtcgagcaacaaaggacgcggctagctagcggtctcgccctgatcaaccgcggtcgtacgctgtgatgaaactcgactgggtggagttccgttgctgtcattcctcgtggaccttctttgtggcgtcaaggcacgcgacaaccgcaagtaagcgaggctgaagcgaggaagcggctctcccaactaccaagaccctccttcgaccttttgtccaagcgggattttcctccaactctgaggccatgaacgacataaagtagacggttggtagaactgattcacttttccccaggacaatgatgatccggctgtgctcttctccgtggctcgagtgacaccgctagatgcttgaccatggaacctacgatcgtgctgtagagtaaatggcgttgtccacgtccgactcttaacgatgagctaatttcgatttgcgtagaagccggctaagggagatcgaagctaggtcatccgacaaggtcgccatccaccacgcctgcaacacgccgcctgtaaaaggttcgcatcgacagcgatccacataagaaacctttggcggaccgattcgatccctcccctcttcgattactcatatagagggagacacatctcctgcaactggcaggagaaaaaccctatcggtctcgccacgtgcccaaacactcctagttctgggtggaagccacgcttgtcaccctgtccaatacgagcttattcatgctattccagcaaggcttccacatcgaagtgtcgcaagagctgacggagaaactcccaatcacatcctctggcgctcacaaagagtgggaaggagctgcgtgcaaggtagagacaactcagagccgccatcccgtctcggagatttcgcatagtgtccttcagcaagggagacgacgaccctccgtaatcgccacgcagtcaagagatcgccttggtctcatcgaagcttcccttcaccctcgcatctggtccattcaacaatacgaatcaaaactggatcggatcggggcgcacacagtctgcagtacccctgctctgaccgcttcaagtggatccataccggagtcattcgcgtcaggtccagagtgttacgctcttccctcgggcttggcgagctcgcatgctggctggatcgggactttattgacgcccgaagccacccattcctctctgcgacaacttcttattgccactactcatccattcagccgagccgactacggccagatgttctcacctcagaacgacctgggctacctttcgtcggttcagggacaccaatcctgtctgcaaaaaaataccgagctcgccgaatctttcatccaaatgagagtcgagttttttgccatcgtccagcaatggccgcgagaagaaggcatcttcctgagcaagacggacccttacacagggatctggtggtgagcttcagattacgatgtatgcaggcgcaaggtgacaaatccctctatttgtagcgatcgttgggagaacgaatttgaccttttgatcgaagagacaatcgattactgggtacgtcatgaggtctcgatttgcggcctgttcatagctgacaaccttttcctgacgtttctcagcaactccgtatgctcgacgaaaagaccgaacgtgtcgcgctagacggtcagtgccgcgtgccttgattttgcgatcgaccccaatgctgaaactttctcctccctatagtctgtgcggattgtctcgagcaatacatacctcgcgattcgatcttcaagatgatcaccgggctgaggcgggtgctgactcccgatattgaatacgacgatgtgcgtttgatcgtgaagtaccgtacatgctgatgctgacatgtcaacgctttagtggtgtcgtcatgccccagatctcgcggatgaagacgaaccatgcgaacaatatgccaccacacactcgagaaatccggcggcttcgagccccggcaaacatcttcctgtcgacaacgaccgacaatcgcccggtacagcgggtctctcggacatcgacagcgagcttcacttcaacgtcgttttcgacgactaagcccagaccatggctagacgagacaataatcatgacacgaacgacacggagatgagaagaaacgcgcatcgaatgaacgcgttcggagtgtgaaagcatgggtcgatcggatctggaacatgacgcctgacaacgacaaatcaacgaattgcaaagaatagaacaacgatcttgtacactgatactagtagataccatctaggccggatacctgaaacgaatgtcggcaaactcccgctcttgccacattcgacggctggtcttgacactaagcgccgcgagaaagcgcgtacgtgtcatcgatccttagcgcagccgggcacagagacgtgttagcagcaatgatgatgcaccttgaaccggatgtcagaacaggttgatgttgtatgtagccaggaagccacggtccatattccaactatagcctcacattccgcttcgtactagacctatcagtgtcaaaaactggtttagacaggatcacggctaaacgatgtcgttcaaaaaggatgaggagcttggcggaatgggtatgtcaacactgcaacggctaccgaagctccgttgagcagcagggtacgtaggccactggaactgacctaggtatacatcctacagccttctaccacgacaaggctacaatcgtgcaggaggctcgtgtcttcaacgaatcgcctatctctccccgacgatgccgatctctcttgacccggatcctattccttttgtacgctggagagacctttaccactcaagaagcgactaccttgttctttggcgtcaccaagttgttccagcacaaggatgtgcgtagcaaacgcttgctgttctggtcatgaaattcatactaaacatctggcatcgcagagcgctcttcgtcaaatggtctacctggttatcaaggagctgagcagcatcgctgaggatgttatcatggtcacttcttccatcatgaaggacatgcagcctaacctcgaggtcgtttaccgtccaaacgctatccgagccttggccaggatcatcgacgtgagtccgctcacccgttagtcacgtcgacaacgagactgacgcgactgtggccgaattgttcacctccagacgcaatccgttcaatcaaccgagaggttcttcaaatccgccattgtcgatcgtaacccttccatttcctctgccgcgttgatctcggcctaccatctgcatcccattgctcgggacacgatcaagcgatgggcgaacgagacccaggaggctgtcaacgcgaaggccgtgtcttcggggagcatgttcggcatgtcatcgagctatttcggcggtggcagcaacagcaacagccaaagttcgggagccgggcaggttcagagcactagctacatcatgcagtaccacgctctcggactgctgtacttgatcagagaaaaggacaggatggccattaccaagatggtacagcagcttggcggaagcgggaaaggaggatcgagcggtgtcttgaggaaccccatggccatctgcatgttgatccgatatgccagcaaggtcatggaggacgatcccaagtgagtgctggaagctccgtccttctcgtagcaggcagctgaacacaaatcggtcaatagcgttcataagcagatgtacgacttcttggacggactcttgaggcacaagtcagatatggtcaatatcgaagcggcccgagcgatctgcgatatgaagggagtcacgccgcaagaactttaccgacctgtcgctggtaagcagtctctcctttcaatccgaagctaagatactggactcaccactcgcaacccgaatactttataaagttttgcaattgttcctctcatcgcctaagccggtgctcaaattcgctgccatcaagtcactgaacaagctgtcgatggtccaacctgctgccgtttctggctgcaatgtcgacatcgagaacctgatcaccgaccccaaccgaagcatcgcgacctatgccattaccacattgttgaaggcatgtatttgtcgaagcccgccagcctctcatcggaagctgactagaaaacctctcatatagactggaaacgaagcctccgttgaccgtcttatgaagcagatctcgggtttcatgacggaaatcacagacgagttcaagatcatcgtggtcgatgccatccgctcactttgtctcaagttccctgccaagcaggcggtcatgctctctttcctgtctggtgtcttgagggatgagggtggttacgacttcaaacgagctgttgttgaagctatctttgacatgatcaagtacatctcggattgcaaggagaccggtgagtcggccaacttttttgctcaccagatcgatgtgctgaaaagtattgctccgtagcccttgcccatctgtgcgagttcatcgaggattgcgagttcaccaagctttccgtacgcatccttcatttgcttggactggaaggaccgaaaacgaaacagcctaccaagttcatccgatacatctacaaccgtgtcgtgctcgagaacgcggtcgttcgtgctgccgccgtatcgagtctcgccaagttcggtgtctgtgtcggcgatcccgctgttacgaagagtgtgaacgtcctgcttcgccggtatgtcgttctctgttcggaattcgctcaggggatcgatagttgacggagacttcttcgtatgacagatgtctcgacgatgtggacgacgaagtccgggatcgagcagctttgtatctgaaggttttgaatgagcaggccttggcagatgtctacgttcgagaaggtccgctcaatctctttgttcaagacattttgggtgatgctgatctcgcatttcaattctgcagagggtaccttcccgctggcctcactcgagtctgagcttgccgcttatgtgtctcacccagagaagcaagagcaggctttcgatatcactaccatccccaaaatcagtcgcgagcaagcggctgctgaagtgcctcgtatgtcgcacgctataccctcctttggcgactgtagctgatcgacgaacattttcactttaggtgctgcccctagtgactttgtcgcttcggctcctaaggctgtcgaggaggccaaacccgccagtgcggctgctgtgcagtcgttgtacgtcgagcaactcgccgctgttcctgagctgcaaagctacggtcccgtccaccgcagcagcgctcgacccatcgctcttaccgagagcgagaccgaatacgtcgtcaccgctgtcaagcatatatataaggagcatatcgtgttccaggtgagaacaggtttcattcgatgcttctggttttgaggctgacttagagtttgtctagttcaacattacgaataccctgcaagaatctgtgcttgaatccgtgtccgtccttatgacggcgaccgaggagggcctgacggaagactttatcattccggccgaatcgatcactgcggacgcaccgggcgtcgtctacgtgtccttcaccaggacatctccagaggagttcgcgctttccagcttcgaatgtacactgaaattcataagcaaggaagttgacccgacgacgggaactccggaagaggagggatacgatgacgaataccaggtcgagcaaatcgatattggcgctggcgacgtaagtctggctgcagcgagatgtgagatccgggcttgccagtttacgccgtcgtatgacagtacatcactccgacctatgcgacattcaattccgagtgggagaggctcaaggccggagccaccgctaccgagacctttgctttgtcttcttcagagagtctcaaaggtaagattttggaaaccctttgcaatctccaacgtcacgctaacgacattcttctgcatagctgcgtgcgattctcttattgaaggtaagcggtatcccttctccttaccagacattccgagcgtatctcatgctttcttttcgctgctctccagagctcaatatggaggccttgggcggaaccgaagtacctgcctcgacatcggtacataccttgaacctgtccggtatgcttgcgggcggtggcgggaagatcctcgcccgatgccgaatgacctaccaggcggaaagcggcgtgacactagaattggccgtacgggcagagcaacaggcagcctgcgatctggtaatgagtgcgatctagacgaaatgtttccagtcctcgtttgtatacttgttgtgtcccctttgctacccacgaacatgattagatccatcccgccgcgatgcttgtttctcgtgattcgagcagcctcttcatatcagctccgttacgcttgtatttgatcgcagcaagatttagtgcagccgatcatcgtaaaaccatgctatatagccacaaccatgtacaacaggggtaccgacatctatatgatgccacgccccaccttcccgcttcggtcccagccacggcgagcgaatcgtcgtctacaacctccttggcttcttggctcgagtaccaccaatcttgatcggcgtcctgtcttccaccttgaccacccgtggcctgatccgtattccttccggcccagccaacgctgcagctactgcttctcgcccctgaccaaagattccgttgaaagcgacccggatcgtgctcttgccgtgctcctcaatggccttgaacacctttagcgctgcctgatgagcggcttcgtaactcgagcgatgggcctttttgaaatccttgtcgatcccgcccgtgatcgtgcgaaagacctttcctcccttcgagtcgtccgtgtaggtaaggatgatgttgtttcgggaggatttgacatgtaatgaatgggtagcggtccgtttacgttctttggaaatggctttcgtcctctctgataccgggacagttccgccgcctgaaaggattaggtcgttcagagggaccgtaggttcgctagcgatcaagcaccgcgatgtagtgcttaaagcacgggcagacgtcgaactaccagcgatggcaagaataccggttgcggaaccagcatacatcgccctggaggccgatagcaacgtggtggagatgatggaagtgaccatagctctgtgcgaacagggcagaccgttcagcaagggcatgctgcagtcgatgcgtcagatttgcctacttagccagttcctttttggtgtttgcaagcgattgtcaagtgacctcgtatgaccagatctgatgagagagagttgtatcgtatgatggtcgaggcagcagagcaggatagtcacatcaaactacagctacttgtgatttctcaatcgatctcgcgcagttgatggatgcactgacaggcggaaatgtcgcgcggacatgatttttacgccgacgtccgtgttaaccttgtcaatgaaggcagatatcgaactggctccttgaatcgtacacactctatcatgatatgctccaatcggatctatcctgcatgcttattacagtgacgaacatgaacagtttagagctttttaaggatcgcgtcgatgacttcatcggtcttgctcttgccgccgaggtcgggagtaaggaacctgccctcgaggaggaccgagttgacggcttggttgattcgagcggcctgctcggtgtgtcccaagtgagacaagaggagagcggtcgatctgatagtggcgatggggttggcgataccctgaccttcgatgtcgggagcggacccgtgaacgctggagcaagacgggtcaagctgaatcagtcttaacgtcctagcagtatcctacaaaaagacttacggttcacccatggcgaagctgtcacccgcgttcaacgaaggaacgagtccaagggaaccgacaagggcagcagcaccgtcacttttgatacattcgcgaagttagcccgatcgaaggcttttgctctgtagggacatgactcacgagataatatctccgtagaggttgggagcaacggtgacatcgaagatcctgttatgggggaaagtttttcaatgtaggcgcgaccgggatcaaccaggcgggactcgcttgcactcactcgggctccctgaacagcctgtataccatgctgtcgacaatctgctcctcgaggagcacgctgttgtaacgctcggcattgttctccttgactgatcggacagtctcacggaacagaccgtcggtagcggaaagaacgttcgacttgtggatgatggtgaccttggggggtccctaggagaagcaaacgcagccggtagcaatgcggcgattcagattgtgactcgactttccttgcgggacaatatcattctcataccttccagaacgatcccgacgggttgatgtctcgctcctgacctctcttgagagcgagctcgaaagccatctttccgatcctgctcgaggctcgctcggtgatctgacggatagcgatggccttcttggttccatcagggagaacggtgacctcctcctgcttgacgtactgcgaaggggattaatacgatcagacatccaagtgccaataaacatacagcctgatcggcatatgcttacgagacactcggtgttctcacggacgatgaccatgttgatctgcttgccatcctgaccgggaacctgtatgtcgcggattgccaacatcgcatcaatgtcaggcctcacgttggtcctctgagagagacaggcggttacgcaccgaagctacaggtcggatgttggcatagaggtccatgtgctttcgcagagcaacgatagggctagagtacccagccaccttgtgcgagggagaagatacggctccaaacatggctccgtcacattcttccttgagggtgctgcgtaagacacaaatgtagagtgagatgaccacatgcatatcgagagtggacgaatttagacaggcgagacatcgtcagtcagtttcgggtctggctaaagatttcgagccgaagctcaccggatggtctcctcggggagagcggtcccggtcttttggaagagatcccaaccagcgagcaaagggataaactcggtcttggggatggatgatccaagagcttccaaggtcctttgagcggcctgtcgtgtacgagcggctgtcagtcaggtctcatgaacgatcgtgttcggtaaacccgaaaaatacaggtaggacttcccggccgataccgtcagccgggatcatgccgatcttgagggtgttacggatagcagaggcagccatttttggggtatatgatatcggaactgagcgactttggtcaaattccaaagtgtaaaggtgagggtttcaagctggaatgtcaaggaagtagaagccaaaagagtatcggttcgatcggaaatgtaaggtcgataggcgggcaacatggcggatgcaaaatgaaaaagatgacgagagctctgatcacgacacactttacctggtcgtgtgtggcttggacccggtcatctagagggaaagagccttgtaacggcgtcagtgctattagaccgttttacaaggaaaaccaactttagtggctggtcaagctggcatcttggcaatgaattgagaacctcccgaaagagcgcatcgcgacgcaaacgcttgcgcgctgattgacgaaatccgagcgctgacaagccgatgatcgacataaaagaatgcgaatttgcagcgctgtaggccttcaacgggcggcatgcaagttcaggcccgagcgcatcccatcccagataatcttctgctcgtaattccattccatctcgctcaatcacgaaagccggtcggaaaagggggttttctagatcgcctagaccgtaggcgctgaatgggctgtgaaatcgcctaacctcatgtttgttatgtttccgccttgaaagtatcacagacgacatatcacatctcctggaaagcaccgctttatgtgtatcctgcgttgtgtaatcccttgcgaaggtagtcttgactgtcgttgatgtcacagtttcaaaagttcgagaggcaatttgacaagacagacaaccctcctgcacgaaacgcacagcgtctcgatatatcactggcgcacgtatattaccttctgtatactcagatcaagatgaccatggacgaagacgcagtgcagtcagccctacaatgtccgggctcggttaaacttcgtcccggcaacctccctcgatacagctacaagcgcagctgttgcgtatttctctcgagaccaaaggctggaaggcgggcgttcgcggaccatcatgattgtgcagccaagaaggaaagagataagaattcgacgatccatcccagtgacacagatcccgacgttagcagtgctttcgcatcgcacaggtgacctccgtgcaggactggtgttttacgattatcgtgcctgaattcgcatgatcccgttggaggtgcaagcataggccgtgagggcacgatggcgttgcgagagctgcgaaggtcagcaaacccggtcgctcgtcacgttcagatatggcatattgcggaatcatagcgatgcccgatcagtcctaagatccaattccgatatgcacatattccgttccggacgtatcctggcgtctaggcctacatgcgcttccgtatagaatagtacccatctcgagtggatcgtattttcgactgggtttgacaatgctccgattttgttcggacagggtcgtcgaccgcttaagcggagaccttcttggatcgtcggggggccttggactccttgggagccttggtgttcttgacgagggtggtggccctggcaacagcggcctgtcgatattagatggggaaagatagttttagcaaacgagccgatcagatgagctgcaaggactccacctacggatcggaggtcggccctggtcttggaagcggcgttcgaggcaatcgaagcggccttcctgccggtggttcccctcttcaagttgacgaccttcatggaagaagcgacacctcgggggttcttggtggcatcacgggtgacgatagcgacaccgttctcgtgggcaatgacaccgacggactgtcgcaccgatcgaagctcatcagtacgctggtattgtatacaaatcatcgcctgacctctttcgtaccttctggttggcaaggggagacaaagcctgggcgtggatgttcaaaaggttgccctaatagacgccgagaggtcagcataagccatgtcgacgaccttgcacatcggccttccgcgatcgactcacgggctccctggagaggatgacatcgggggctcgcttcttgacgatgaagctggagttggagcggacgaggagccaagtaagatcggaagacattttgctatagccaacatcgcaccggggtcacgtgtcagcgaatgttgcactgcgtcgagtagcggccaacttggccgagtgagacagatagactcacaatgaagcaaatagattgattgagagagaaatccaggtctgatcgcgaaaggggtcgaattccaggtcatccccgttcaatgtcttgatttggccaggtgtgtccgggatgggggggattgcgctggaaaagagccaagagaaagcgggaggtctgtcacgtgaaagttttgcgatggccttcacaccagccttgccgacccctctccttccaaatgctgactaccgtgcatgaacggttttcaagattgggacatgcccgggcttaattgatctgcaatatcttcaagtataaatttgtccattctcgctcttatgcaggatcagttgttgagtgatggaggacctcgcattatcgttagggtcgtgaggtgcgcttaacgcgcgcacgaccagcgggtagctcatattcacttgtcgtatcgaagtctgctagtttgatgcgatgaaagcggatggcagggcactcgccaaacttttccccttgatgggagcgaagagttgacgtcgctggtatctgcagtctagaagataaacatctgtggagcgtcaggcgaggatcagacgataattgccgctcgcactgatcttcagccaagatatgtatatgcgagactcgaaacgttatacagactgctctagctgctctagatggtaccccatccgttggtcttgtaagcgccctccatctgagagacgatcttgtccagtccggccaaccacgccttgagctcgacctcggcctcgggtccgcccaaacgggtgtaaaagtccttcctgtaaggagtggccttcatggcgagctggaaagacaagtgccgggatgaaatgggatcaatggggtctttcgatgaaaccggaggacgaagacactcaccccgaaagcttgcttgatgacccatccgtggtgaggcttcaacgaaccctcgtaagccttggtgaaagactgagcgagctcttcggacgggttgttctgggacgactggagcccaaggagggtgaacttgagacctctatgggatgtacgatcgacaagacaggtacagttgagtagtgcacagcacaggtgtatcgggtcatgccgggccttaccgaatgagccacatcaggccttctccggcggtcccgagcttgcccttgttctcggccatctcgttcttcaccaaatcctcgagggttccagactgctcaggagccttggcgtacctcgctcggactttctatgatagatcaggaatagcagaacgtcgtccgttagctgggcgaattatcggtatttgatcaagtccagaactggtgacttacggcgatgttacccttgaggtctccctgaacgatggtgaaagcagcatttcccaagacgtctagcgggtaccaaaacagttgcgagcacagcagtagatgaggtatcggataaatgcaaaggcaatgagcatcgattcgagcagcagctctggcgtgtgggcgtggaactgaccaaagatcgagacgagaccttcggcggcgttggcaaagcctacagtctcaactccgggagtggtcgagacatctttgaaagactgtcgaccaaggccgtatccggaagagcgagattggtgagcacgacatgatcacggcgagttcagtccatggcatgtcgactcaccgtctggatactctggaagaagggcttgttgagctcggatacggtagacatgatgaggctaagactggctgactggctggtagataaggactgaaaggaatgaatgagaggtatcgtggagaggggtggcgatgacctagatcacaaaggacctggtccgcaacaccctcgggcgggagagtgatgagctggtcaacagcctcgggttgtgagccggaagcaaatatctggtcctggaaacttcggaagtaaattccccggccgaggtcagagtagaccgacggtcaatatagttgcggctgggtgtattcgaacggcaatgacaacaaactaaggtcttgcacgatgccttagtacatggtatggttcatagcgcataacaaatagaagagcacagatatggcagaatctaaatccttctttcgcaagctcttgaagaggccgaacctcagtctccggcgttcgacaacgacagcagatgctggaacgaacatcttgccaaacgacattagcgctttcgagaaagtctggctagacatacatgtgagcaaaaacgacgtgaaaatgtggaatacttgaggtctctatgctgaatgcatactgttccgctttcttggcaggatgttctcgcagagccggatgagaaacagatccttaagggcatcgcgagcacggcggtacctgctaggctgaaagcgttgcgaggtgctttgtcgagcgagatcgaccggacgccacaggggtacgcactttcaacgaggctctcggtttgaagctcggatgctgaggtagagatccctgtacttcagggctactggcccctttctggaaagcttcatgaacacggaaatcctgcatcagctcgtacatctaagtcagaccgatcggccattcggcattaaaggttggtcatacagcgttcagtatccgtgccgtctattttagctaagccttcgatgatgaatgttcagccgaagtgctcaggttcactacctccttgatcaaggcattgccttaccggtttctcttacactcggccatccatcagccagtctcacggctcatccggtccagcatgtccgaagtggatttgacgaatcaaggatacctatacggggctgcggcggcgtcgccgaggttgcgttcaaagggagactcgagagctgagagtgacgaagaggaagacgaggaagaagcgatgcgcaggttggcggtcatgttactggcagaggtgtgtgagaggatgaaggcacagtgagtttctgctgcgatgctgccaatagttttatttcaaggttgacttggttctcgatctgtctagccctctcctccttctggtctttctgagcgacccggccgacccgtctactttcaagtcactcggaaccgatttcatcttcttcagctgcttgctccggtatacgaatcaagacggggaaatcggacgtgtcgcacgcgacgggctcatgaccctgtttgagaccatcttttgcgaccgcgaaacggaaacgccaaagatcgaaaagccggaagccgaaatctttacgctcgaggacgaagctgaagatgcagatgaagatcagacgacgacatcggtagacccgcccgaccagacggtccgggaagcgaggttgacgctggccaagcacgtgctcgaacaggacttggtggaaatcttagtatccggaatcagtgcagtctactcggtattgccgacaaagattaaattgcccgctccgaccaaggacgatatcgactatgagggtggactcactgctttgagcgattcaaacgcgctgttcgacatgaacgaagaggagcgacctgtcgccgaaccagcaaatctggcctgcatccaggacgagcatatacaggaacagctcgctctcctcgccgaccttatcgactttaccgactacatcgtggcatgctgtcgtactcctgccacagtaggaacgtcaacgctggcgaccatcggaacccagctgaccgaggcgttcgaacgtacaatcgccgcctcattcgtggaccaggtgataacgccctttatcagccagagttcggttcaagacggttcgtgcacggcaatcgcatgttacctcgctcggctggtccgggaaacgtcggtcgccgagggaaccgtgatgtacctgacgatagagagactgctcggtcagggcacggaagacggccgacgaagtgagtgacggacgccatgtcggatcccatatggtcatacgtcattgacgccaatgccaccgatacagctggttcagacggtttggctggcctcgggtttcttcaggtgatcgtcagcaaggcgactgtctaaagctacacatgggagggcgagcttcgagcgagaggagaattctatatcatttcgcttgtattgaaaagcgatcacgtcgtctggatacatgtgcttgttgcggttcgtcacagacaagtcgtgcaaagaaggaaaagaagcaaatgtaaactcgtgatatcattcttttcgtttccaccttgggtggtgtcaggacgagccacggcccgctttctagaaggctacagcagaacgcaacgtcaatatcgtaccttttggtatctcgtacgctggtatgccgacgactgacctgaaatcaagggaacacattccgcctcgaccttgagaggctcccaccacatgtgataggcttccatcagcctcaatgccgcctcctacttctggacttcgttgtttttgtcgccgtcgttgttgtcgtcgccgagctcaagctctgcaatgggcagccaagctgagagggccgactgaagtggtcctttcttgaagcaatcctctcgaatttactcatgagaaggacgaactccatctcggcgtccgtcttttttgttgaaaggccccaagaggactcctttgagagggaccacttcgtcagaaatttctctccaccctcgaggtccatctctaccgttccctaagtcgccatcgccattacctccgagaacacttccccgaaagccctgaacgagggcacgtccggtgcgatcctcaggagctcgccacaggagcccgtccaaagcaacgaatggaggtggaccagtcccgttgtgacgttgatggccttgccggcctcgtatcgtcgctgtcgacctgcatataaggtcacgtcccatgcaaagatcctgcatgaggatgtcacccattaggccgtgtgattttataaggaacataagagccagatgtcttatttatgcggtttggtcatcagcagaaggtcgagcgatccccggggccgcgtacggcgattcccgaaggatcaaagtatgaacagctgattactccggaactcctgctgtatacgtacctacctgtacccaacgcacaatccatgaccctgtgacagggcaagtcgagagtcttcaagagtccaggaacacagtccgatttgatagacgaacgatgcctcggctacagatcttacagtaagtctgcgaactttgcgatcttgcgcacaagcagaaggtcgagccttacatcgatatttggtctctggaaccagacacaagtcatatcacccgtatctcgagaagaataaagagagagtgcggaaagatgaagaaaaagcagcggtgttggaagctgaacaggagcgggagatgctgcaatcggtaagtggcggccggcgacgtacggaatccatagctgacctctttttgatgtgcttcgtaaggatcaagccgcccgattagaaatgcttcgaaaccgtccagagacgtttccccaaaatgctcaagcttcgacgtcttcgctcatgccgtctgagccttccaagttgcttagtcgccatcgtaagaacaaagacgaatcggccgaggatcggatccgtaaagatgcaagaagcgaccgagccagactcgaattcgattggccagacgttgaaaagcggaaagcagagaagcgagcgatcaaagagcaagagagtagaatcaaagaccgagaactaggcaagacacgtccagccgagcaggcggaagtcggagggaatggcaagcatatcaatttctgggcaggcttggaaaaggacgtaagtgaaagccagagctatagatcataatacctcgacaagatgcttagattatcttcgaacattacagacagctacgattcccggagcggtccttctcaacaaaccgaagccgacgccagatcaaattcaggatgacgatccgaccacgatgtacctgaaccgcccagaaagggagaccaagccttggtacgcggatgcacaacttaaacgacacgaggagaaaagtgacgacaaagactcgcagcgtaaacgggaaaatcgaaagcgagtcaaatcgcgatgtatttcgcttcaatatacctgaagctgacatgcatcacccttgcttgtggacaggcgtaaagaggaagcaaacaagatgcggaatgatccattgatggtagtacagtccgccctgtcaacgtctcaagctagagtgaagccggacttcgagcgaacgaaccggacgttgccatccacggctggctcttcggatccttcagcagcgaggatagcgagagagcacagtgagcgatctcgagccttggcgcttatttccgaggcaaaacgcaaacaagctgctgcaagccttaccgctacgccgagcaccgtcattgctggtgggaacgaatacagcgatatgtggaacgcccaggaggttagagaggcgaggaggcgaagggacgcagtcaagggctgggtcggcgacgtgggacgggatactcgcgagcaaggctgggatggcggacgccgagattcatttcgtgattggtctggcgaggtgagaagtgaccgcaattctcagtcgagacgcggccgaggccagcctcggtactgggaggtataggagcatgctaattacgtcctacacgagtgcgggcggtctcgcatatgaacaattagggcgttacgttgttatgcgccatgcgtattcttatgcgttcgcatgagtacagacagtcgctagtcgtcgtcataccaatgtagtcgtggtttgatattgtcactataagttctcgtgtcgttcgctttctgctcttctgcagtggtcgtgaggggtgtcattgatggcaagcattgagcccattgttgcttaaaaagttgagatctcgctgaggtcgcttgatcaagcatgcggaagatgtatggtctgcatctaagcgttggcatcagtatcgttttgcttgggacaagtcactcgccgagcctttctcgcgcactcacaaacggttcatcgtgcgctgcatactttcggggtggtcgtttccacgtcgcaagctgatccgcatctcgatccgaattctggcgttgtaacggtagaacgaccccgagttcgtaattcttgatgctgtacgtcgcaagtgtcagcaaactgagacacaagtcgatctacggtggtcggacatactatattttcgctttcccttgcggaaacgatagatggccctgtttgtacttggatcagcctatcgagacccggtttcaaggtcaaaggtaacgaacccaggcggcttgagagaggttgtgcgacccggcgacgtatgcccatccccccatagagccggcagttgcgatgctggtttggtcgctacttgttgaaggttgtacagttactcgaggtcgaaacagacagataatcatctgtcgatgttcacaagccgatttgaatttcctgatagatttctagcccaagagatatcgcctaccttggtatgcataagcacgctgccgtatttgcacacactgtccgaaaagtacggtcttgtatccggcgtgaaatgcgatggcgtgcagaacatgctaccgcccccctgttaacaagcacaatcaacctcattcatatttcgagacaatagaatgagtcgctgctcttacctctctgccaagaagggtgtcgtcgaccgtcttcacagacgggtacaggattctgaatggcatctcggtccctaatttcgccggaattttcatcttcgaaacgtcagccagagctcttccgctgatggcggagtagaagtgagaagcccactttggggtcaacttgcaaagactagagctctgttacgaccacagcattgccgttcagcgtctttcatgtggtgatatgtcggctccgagacttgcctgatattcaacctttgcgacctcggttgctgtcgggatccaacctctttctctcaattgcaccgcaatactgatcatacccagcttgtggtcttcctcgtgcgatccgggtaagctcatgaccaaaattccattcactctagtccagtcccattgatgtaggaagttatcatccggggtgtttgtcgaggctagaatactctctctccgcttctcatggtgccgccgtaaatgagccagtgcttgcgtgatacgtgtgtgtcggaacaggctatgaaattggctcggccaagagtgcggcgagccattgcgaggtgaaacagctactctagccaaatcttgcacaaatacggtctacgtgatcatgtcagcacttgtctttgtcggatgaacggggaaagatgcactaacgttgtccatgacataccaatcggctgatcgcatgttggcgcttgtgaccactactcgaagtcttcctgtcttgtaaaacagcaggaggaacttcatgtgctgacacccgaacccgccaggaagaaaggcaaacgagatgaccgtacctgacatagcgtaggggaagatgagtatgtgcgcacagatacataaatgatgttactcttcagaagtgcttaccccgcttgaaaccctctgtatactcgtctgcctctttcactcgaccgttgcagtctccggtcggttgtgtcaatatcacggtcggcacagaagttggatccggtagatgttgcataaaccaatccatctcccagcagaacgaagcagcaattacgagctcgaggtctgttttctgcgttgacgcagttagaaggcaggtcagaagattaaatcttggtcaatccgaaacaatttgtgtatctgctcacctccccgatgatctcgtcgagactaaaagtcttggccggattgacgaccagctgattcctgacagatctactttctccatcccagaagcactctcccttctcccgtccagcattgtggctcgtcttattgtcaacgttggcgtcttcttcgtcatcggaaatctcgatgacctccttctcggggatctccggtacgtgctggaatcgtccatccgtcttgaccctcttaccgatgtgaacttgatccccatcgtcgtcgagctgcccgttccttctcttctgcctggctagtcgctcctgttccagctcggcccgctctgcagcggtgagcgagttcatgatgatctgtatcaggttgaggcgaggtttttcaatccgatcagtttgtcgtgcgagtcgatcctgaagcactagcgaacgagactcactttttggcgaggttgtcagaccatcatcgtcacagcgtcgggatatctgaagaggtgaccagaagtaccggtctatgtcgtcgcactggccaggatggtagctgaacgctcggaggcagatggaacgggatctagatcgcgacgttctgatcgagttccagcagcgagaggccttacggacgatcaccgagcttcacttacgggacgacgagtcggttatcagtccgggtaaaatgtacaagctacgagcagaagctcagacgcatcgataatggataatggagaacctttagcagaattgatagtgaaacgagtactttcgatgagtcgatacattgtcaatcacaggaaaatctaggattgagcgattgtataatttggcaaagtagaaattatacaacacaatcgtttcaacatttctacgttccgtatcggctgcgagacgagcgtcattaatcgcatgcatgacatgctcgaaacgaccccatcagcccgtcaacagcccgaatcctgacaagaccgcgaaaggaaagtccgccgtccgacaaacgtcaccgaacgtcgtaaaactctaagacgagccgacgccggtgaacgtttgggagagggaatagggtcacttacctccattctggtacccgttcttatacgcctactgggtgcaatcgggtagacattttccggttaaggcagaagctatgactccggggtccagcaagcatgttcggaaagaccagattcttctccattcccatgatggcccgacgaggctttcgtccacacgctgacctgtcccgcgagaagagaatcggaaagggccgaaacaactcacctggatcgaaacggtccgagctcgaatccatccagtccgacaatgggtgactcggtccggcatgcaggtgtcgaggctttggatacgcggaacgaaaccgcgtctgaagagtgagtctgtccacttatcgactcgttgcgtgtcgtactaatctccatttgtgtcatcagagtcaaagaggcaaacggcttgcgctgcctcgaagcgtactttacttggttcctgcccatcgagaccgaggcttacgtccgtgagtcgatcgcctagacttacgagcgcggtgcgcaaaaggctgacttcgacccggtatgcccccgaaggcacatgatgccttcgctctttgtgatggcctcctgagttacgacaaatcacgtttccgagaattctgtagagtcttcggtgcgctggcagacgacaagcgaatgtatcacacagactagacgacatcaagagctcgcaaacgagacgagccaaaccacaatcattataccgcatgttcgccgttctgctcggtctcatatgctactgatctgatgatacaactgggaaacgcaatgcaagagtcgactggtggtgtcctcaagtgttgttgctggctattatacggtatgatcaggacccctctcgcagagataatgctagcttttcggtcttgcgtagccgacaattctagttgaggaatcctcgacatcgaggcgatccacacagacagatgaccttgttctccggcgactcgatcgggaaatgatagtcgtaagtgatctcgtcgccgggtaggatgtttgttttggcgtaaataacaatctgggagcgtgcgtcaaagaccgatcagcaggggagaggagtgtgggcatacttttgtctcgttactcaccttcttctcgccgttgatggtgatgatcttggcagtacaattcggcgtacagcagtggttgatcagcctggccatgcttcccttcttcgtcgcatcgaccaccgcatcgtcgtcgaccctaaagaggtagctgctcccgatcccgatcttttcgtaccacttttcccggatatccgcaacctgggcccggatgacctcgccgacatattcgatgaccatttcgccggcagtgatggactcgactgcgtatagaccccagtcatggataggtgatcgttggaatttgagctgctttttcctcgttcgcagctgattgaaagcgaaaacatccgagtcggcgtcggcagccttcttggattgctctatcccctggacgaatcgccgagtcgcaacgcgcgctgatcgcgacgatgccaccgcgttgttgttattcgtactgcttgcattggtacccgtgttgcctgctggctgatctacctccacaatggctcggttcctttgcggcaagtactgagactttgcgacttcctctaccttgtaatacccatgagctcgagcgcagccggaaggatggatatagccgccttcttcctcctcttcgccaggatcaggctcagattcgccggccagtgcggcttcttcctggattcgagtcgcctcttcgggcaaaatcggatattctcccttggccttgaactctaccacaaggcgaagcaagtatagatcctcttcatcttgggcaagcccactagcaaggggatcaatattcggcggtcgcgcgaccacaaccggcttctgatcgatttccatgggttcaaggtcgatgtccattatatcaaccggctccagagccttgaccggctgattctttttcgctcgtttcttcgggggctgtcgcttgtcttctttgcctgcaggtttgcgctttcctttcttggcgggaatcgggtcaatggagacgtcgaccgcaggcaggacagtctcggtgtcaggcggaggtttctcatccaacctcgctacaacaagcgtgtccttgtcgttcgaaagtgttgcgacgagatccgtctctgtcttctctggctgtttggcaggatccacgacatccttcgggagcttgaaaggaacaaccgcatcggcattgtcggggaccaccacaggatcgagcttttcggccagtggcacaagaccaggggcggcatccagcttgttgccagctaggattggggagagacttcgttcgatcggtctggagacagccttggtctcgatatccgacataggagactcggagtggactcgtcgactggtagctttgcgttgcttaggagtacgccggtcgatcgttttttcgagtcgagtcgtggcaatgtctttgccgacgctcgaagagatcttgcgcttgtctgtccgcgcatcatgctcgctgatggcgaggtcgtccttgttcgcagccggcggctgacgatatccgcctctgacctcaggttcgatcttaccgagcgggaacgaatgcatcttggcgattttgaggcagacgcttgccccatgttcttttgtgaagagcatgtaccagccgagttgatcgtgcagaacctaatatttcaacagatgatcagacgaccgaaagcgaactctgtcacgagataactgacatcatgacaacccttgaagtggtgcttgaaactcttctccggatctttagcttcgatatcagtcaccttcgggacgaagatgtatgggtagccgttcttgcgtaactcttccgcaacgacatcttcaccaggtgcgatcggggtccgagttggcatagcggcagatcccgacttgacgggagttgtggtcgtcttgcctcggcctttgtgccgttccaagcgggttttgggatcgatcactagatcgtcggcattgtcgctgtcctcttcagtatcgctagaggtctcagagagagcttcggctcggccggtctcagtttctcgaagctgtccagctctcgccgagcctctgagtccttcccgatcgtgttggggcttaaaaggcgcatcgatgaaatcgtctccagcagtggctcgggaggcgttcattctctcttctcgcttgaccgcgtcttcatacgaccgcatctgagcttggtagtgctccagcagagtcctattgctggtatgatgcggattttgagggtggaaaggcccataccggtcgtattttgcgtagtgaggcatcctcggcggtacgagtcgtgactgatattgtggctgaaaaggaagattcgaaggtaaaggacgcgcagcaggaaagcgatgttgcagattgaggggatggaacggttgggccgtcgactgcatcggcatagggtgccagttacgaaccggattcgacggcaaagggactggctgcgttcggaatgcccccgtattattgtgatttagcccagatacacctgtgccattcgcggcgcctgtcgatacagggacctgcatggcgggatcgttcgccgcgagagattgaggagttgccagcggagcaagcgactggttcggcgtcgggactgacggagccatagacgttgcgggataggctggagtcgcaggcttcagcggcgcgacgggtcctttgctatcccgtttcgccaatatctccttttccaacttcgccaatttggcaccagttctgtcgagaaccactcggactttctcgttctggaccttgtaggcgagccctatgcgggtgttgtggagggcgcgaacgacatgctgagcgaagcggttggcagcaataatttcgcctgctttgatgtcagcctcccgctgtctgtgccgactgcttccacccgcttctccactggccgatgacagcggatagcgccccttgaactcgaccctgcaaagacccatatatgcccccttcttatcgagcttgaggtcgattgaagcaatatcgaccgtggccttgacccttccgtccgaatagctgaagttcgatttgagctccttaattttttgagtcacgtccgatggagtcgtcaggtggctcagctccgagatgcatattgcgttagctggaggagatccggatgaatatgcgttccaagactgttgacagtcccgaacgaaagacggcagtcagctcaatgaacgcagtacaagctcgagcgatgtcactgacgtatgtaggggtttcgaccagtccatcggatcggttcttcctcggtccaaatcccatcaatctcttctccttcgaaatcgttagcctcgcgtcggacgcaacgatttcgtcttttccttcggccacctcgccgtcgtagcggatgatttgctctttcgctttccgggtttttgaggtttggggatcatataggacgaggaaatcgccccgaccgacctttggacaggtcgatgccggcggtggaggcggtacgtattgtaccggaggaagaggtgaatccggtgggggtacaggcgcccgaatctcgggtggcggtgggggtggcggcgatgaagataggctacgtcgatttgctgaagttcgaccacctgggatcctatgaggatgttctgcgaacgatttggtctcacggaaacttgctgtttcttttgactggaatggaatcttgacagattcgcgggctccctccaattgcagtggtcgagcgtcttcgagcttcgctttcctttcctcctctgcccgaggaaagccccgtgcttcatggtgtcggtctcgagaacggctgataggtctgtccctgtccctgtccctatcccgttcccgttcccgcgcatgtcggccgcggcgatcgtccctatctgaccattcatcagattcggtactataccgccgtacgggcttgtaccgatctatcgtagacccttttctcgtaggtatgacctcgcttgtcgtccgccgatccaattcgtaggttttgtcatctcgaggcattctattccggctacggctcctcgagacgctccgtggacgatgtgagcgatccctcgattcgaccgagtcgtctcggtagcgtcgcctgtaggacgggctcggactatctctacgacggtattctctcgagggacttctctcgtgtcgtgccgggctggaacgcctggtgtgatgatactctcgtcccccatcgtggtccttcaaacgatcatctcgccgtcttggcggtgatctgggtggtgaccagtgatcccgtgtagcccgaaagtcggcggacggcgatcggccacgtcgactcgatccgacttcaggcttcctcggcattccagtcgatctgtacaagggcgagctgccctcggcgacaggccacggagtggaggcatgcgaattgttggtagcatatcgatcgtgcgagatagatccgttctgaccgccgtgttgatgctgctcgagatgggatgatgaaagagcgtgggcgtggtgctcacgagacctggcagacctggcaaggtcgatctcagccagttccgtgacgagcgctcctgctgtccgtgccgatgagctagaagccaccggcacggggagctgcccaggttcgccgtcgtccagggagggaatgaaggaaggtacgtattgggattgtttcctgttccgcttcctttccaaggtcggagtaggttcggtaccagggggtgagcggggtcgaggtggtggtggtcgatacgagtcttctcggtcgtccaccaagctcgggaggctttctcgtcgatcgtgatatgaagcatgtccattggttcgtgatccatcacgatatcgctctgatgatcggttgatgggaagggagatgtgcgtcgattcgcgaggatccagagacccggctggaaggtaacggcgagatgacgatgttcgtggaggacttgacggaatccgaggaggatatctgtctggtcgagctggcaagccatgtatcggagctgcgatccgtcctatcgaggtcttggagcccgtatgggtttcagagccattaccgagccctcgatcggatgccctttcatgcgaaccgctggcccgaaccggtttgtttacctcagggtcagcatgatactggcctgagcttaggtgaggcggtggtggtcgagaccaggaggacatcacagctgaaattacagagtttgatctgaattattctagcgtctgtggttctgtcagtaggatgtaacgatttcaaggaaagctgaatcaggcgggagtcctcccgaactgtttatcgtgtcgtcctgttggctcacctcctgccgttctcggcgaggatcctcgcaccgaaagttgaggctctcgagtcgaccagctgtccgcttgaggtcagaaatatctctggtatgtcgatgaagcgtaagcctgggagattgaaggagtctacgaagagtctgtgatgttggacaggtagcaggtagagtagtactaagatgtagttgcaagcaaaagtctgtcgctcacgagaagcaacgcgctcgaccaacgcgaaccctcgcccagggtttgatgaacagcataggtctcctcatatggtttgataggtaattagacttgtatccatgcatcgatatcaaccacttcaagcatgatcatagacctactctaggagtcgtagctagtcgctttgaacaaggagcttggtagtcacgcacaggacgtatcccctacctaaatcactagcctcgaaaccgggcacaccagggcaggttcgagacattcatcgatcggcgaacaccgctacaggaactggttgaccgctggcggtcatggattcgggcaaaccatgtcgctcatcacggacaaagcgtacgtatgcataggtcttcaacgagtggatctgccgttcgcttgaatcctcgattcacaattgctttgtagatatctgctgcatgccctgcgcctttctcatcttcggatagctacggatccgcattcgtctcgtatcatttcgctctcgccatccgctttatcggacaatccatacgtacgagggagcgggctagccgatgtcgatgcatggccagagatcgtcgctgcgctcgattcaccgcctctcgaggtagacaaagaattggagcgggaagagggcaagtcggatgacgaagatgacgaactcgaacgtgcccgtcagagacgatggaagggcaaggagacagagcgaacacggatcaccgatagggactcgactcccggacctgctggagacggggcactcgatccaagcgtcagtctcaaatacagtcagaccatcggtcgtgtatcaaggtttcagccagggatgcaagtgcatggtcgatcagatcgtccgacaccggcacgaggcgattcgtccgcggcgacatctgcgactgtcactcccaccgcaagaaacaacccgggcatgcatggcctgccctcactagatgcactgatgaccccaggaatgacaaagcctggagtggatggtcggcgcgatcgaatacgtgcctcgaccattgacgagacgcgccccgccggctcgttcggaatgtccccacaaacacctctggcaagcagtgcgacgaggactccagtggccagagcgcttacgagcgtatcttcccggacgacaccgactagacaaactttgacgcgtttaactcggccacgggcggattccgcaccgatgctggtcgtctcttcgccctctggacgagacgaaaggttcccacgagacccgtctagtcctggcgatctcgctgaagacacctcgcaaacgcccacagccagaccccgtccaccctcggctggcgtcagatcacgcaggatcacaagcatgctcatgcaaccctccaatgtcagcgacgctgcgttttctcccgcagcaatttcgtccgtgctggaacagccttatcaagaaggtacgggctataacaccaatgtcaggtcgaacgggcagaccaccgacatcccacccgctggtgcggatccccacaccttcatcatgcagtcgcagtatggaagtatcttggaacaggccatgatgagtcaaagcgtcgtcacgggcatcaccgagaattctggtatgatttcgagctcgggaatgggcacgagttatgggaatgggtttgatcagatctacgaagaagacgaagaagaggatcaagaagagacagagaatgtgcaggatgatctggaagatgccgaccgagatcagcacgacgtacatggaagagcccacctcatgggcgtcagatcgatcctcaccggtatggacttggctcccgagctctcacttgccagcatgggcggcctttcgggtgtcaatactcgcgccaactcgcaagcgggttcgacagatggcgatggacccgtacgtttcagcggggagagcgccaggacgaccatctggtctgggcccgcatcggccgcccagttcgaaaagcgaccgatacccgagagaccacaggcggcttccacttcccccttcgcttccgggctcaccacgttgctgaagccgaccgaacaagaggacggcgcgatggaaaatcctttcgctcgatacgcttcggtgcctccacctcaagggagctctgtcgcctcgttgaccctagacatatacttcccattctcgaaagatccgctcaagccactttccgtgactgtaagaaaggacgtttcggtggacgaacttatcggttgggctctacatcaatacctagaagaagatcgtagcccaggactagaggaagggcacgagagaggacctaatcgaggtttcgatcccgaagtgtggtacagtaccgcaggatgggccttgaggatggttgaagatgatggagaagttgacgaagacttcccaggtgagtctttcggattaccgcgatacagcggcaattgctcattgtccgttgacggttctagccctcgatcgggagagccaagtcagcaaattttcttttggcagtttcgctgttgtagaggctacccctacccaaagtcagtatcagccactttcctagtgtgtgcgactccacctgacgctagatgtgctctcgtccggtagtcgagcagagcttgataaagcaacctctccagcgctcagggaaagcgacgcctttgctccctcaaacttcacaattcggtggctcgatggtgtctcccactgcaactccagtcaacaacgcgcccgcccagggaggtgcatcgttttcagcatctacgatgggtgccccttcccgcaatgcgcttctcaacacgccagccgcgaacgcatatggcggactcaacgcgtctgtagggacggcagcggtagggggcgttatagtgtcattgaaggtccgggtcatattgtcttcggatcttcagttcagcacaacaataagcgtgtatgtcgaggctgctccgagacacccatgattccgctgaccttcgctgatgttcgtttgttccaggccatccgagatgtatttcgccgacatcacggaagcgctcattaggaaaaagaatctcaatcctccgaaccccgcggaatgggttctcgttttgggtgacttgtcgatggttttaccgctcgatcgaaccgttgaaagcttgatgggcaatgtccagctcgcacttgtcagaaaaggatgggcccagactcatggactcgctgtagccaaagccaatgagcgcctcggtggcgacccaagcagtgagtccggggcggcatatcgaaaatcaccaggtcgctgattgattgctcttggtacagcttcgattttcaagcgtcggtccgaagcgcctccgccgacctcacctcgagcggatatcacttcgacctacaagaagtttatcgtgcaacgaaagatgcctatcggccggcacgagcggattcttgcaatcgacggcgattacatccacgtaagcagcttgattttgacaagcaccagaccatcactaacacacgtctcgtgagcttagattatgcccaccgataacaaggctttctttgacagcatgaaaacgtcatcgttccacgtcacatccattgtcaactgcaagcagagcagcaaatctccaacaaatttcaaggtgattgtttggcgagacgacgccgagaagcgatacgatttcgaggcagacaatgctcggcaagctggtatgtcattctcttgcgagaagcttcattgactgtgtttttaatctcgaaaatctcgcttagctgaaatcatatcggctctacgagcactgtaagtgaaccgcgacgcgttctaccctacgtcagcagaatgctgaataaacttgatatgtcttgcagaatgaaattataccaatccgaaagagcgaatctgatcccatcgccagcatcgcgcccaactagacacaggctacgacgacattaatgaattcaacgaatatcggtatttgtgggtgtatgaaattcgaattatatgatgactgtatcgtttcttgtattgtaaggtgtcggccattgagggatagtcagacaacgtcggagaaagtcatggttgataccagccgtggggcgaggttcgggtattctgggatatagtccgggtctgctatcctgacgtccaaatgctcaaggagattgacgatcaatgaagtctcaaaagctgtgtttgcgaagaccacatcagatgacatggaaataggccgcaggatattaggcgccataacgagcgctgagtagatgacaacacgatctcagccatcacaggatatgtcgaagatggaagtaaatgggtcggcttacctagagcgcctgcagtcatcttcgtaaacaagatccaccttggctgtatgaaaagtctggatgacaaagggggatcgacaacatgtgcccgacagctaaaggaagtgagacttactgcagcaacccgatgatgtataccaaaacgcgtctttccgtcggtggaaggcgttgaacgaaggcgcaactattctccggatcgcgggaagcctggagcgcctcgttgtacaagtcctccggtatcaccggctcttccaactcccgtagccatagcttgaggagtgccgtcagcacgtggggatcatccacgccggtctactttgcgcgaaattccttagcagacatgcgccactctggacggcttttggtcctcaccaaatggtattctcccctgtcgattcgcgccttcatctcaccaatagagtccagatcacctgttgtgcggaatgtaccctctgcgcgtgcgcctcccaaggatataatcgattcggctaggaaaggcagtatgtgcggaatcgctagttgcgcgcctgtttctcgttgctgcgtcatgatgtgatccaatcgttcaccgaagatcgaagggtgaaaagcggcactctaggggtgaaacgtcggctcgatgggcaagctcttcgaaaccgataggtatcaaactcacaaacgcttgttcgatctcgcctttaatttggtgtcagcaaatgtaccgatcggttggtgtaatcacggaaatgctcactatacatgggtgcgcgtgaacggggacctctgcgcacgatattgtcaagcttgcgcttacaatctgttttgcagttatcagatagggccgcatcggattgttatcgttgggaaactcacgaagggcaatcgttctcagagccgggtctccctcaatttgactggtttgcaagaaagatcgcacatatggctcgaattcgttggaaggaccaaaggtcaccacgagaacgcaaatcagctggaacccccgtaaggtcgatgagctgaaatgaagcaggtatcggcggatcgtccccaggacatcaaaagatacgcttcatattctgctcacaagaccgggttcttggtgacctgcttcatacacatggcgtataactcgtcccgcaaatccagggatcccaggccgagctgcagcagccaacgttcttcttcgagcatcaagcgcttctcagccttgttccatattcggtccttctgtgaaggcgatgactgtgccatatcggccaaactgaaagcagaatccgagctggaaactgtgatgatgccctcgaccgggcggtcccggtcgcccatgatgtgctgaatcaccttgaaagcctttatgatatcagacggcggggtcttggtcttgctgagaagcgcaccggtcacgacggtctagacggacggataatcttgtgtcagcactgatgaagaagtaatggtagtagcttggaagatttcacttaccccttgccattccataacatttgcatcaggtatctttctccgcagaacacctttgcgttgggtcgcaaaataatcccgcgaataagcttccacgcagaacacttgatgttggtccacgggatttgcacgaagggcaggctgcgatctaaggttctcatctcaacacttgatcagatgcatcggaagggaagacttcgacagactcacttggagcccggcaagccggtactgttttgactcactaggaccggaccatcgcgcatgataggagaacccgtaattgcaggctgcgcgcgtcggatgcgcgtaggcgtgctcaacaaggctgaactctgtcgaagatcccggtcgctagcagacttgcgtattcctggcctgaccggtggatcaagacgtccatctgaggccgatcgggtcagcggcaagtattcccgcgtctcgatacatggacttgccgagatcccctccctcctgcctgatgacgtccgacaacgtcattacaggcgcggtagactgtctctccttggccatccacaatgtcttgaccgaactctccctacgtttcctgccctttccgccttttcctcgagatcccattgcattctctttctccgtctcgctcccgtccgtctgtgattgcgcaggtctgcccgagaacatgaacgacgtgtcggaccgcatttcgggagaagtcttgctactgacaccccaggacgggaggttgaacttggatgtcgttctgggtccagatgtggacgacgatgtcgaagcggacgcgcgcaagttgggggtcgaagaattgttcgactgattgtagaatttgactcttagagcggaagagggcgactcttctcctcctcctccgctttgatgctgggtttcaaagacgttggacgacgaagacaacggtgggcgctgcaaaggaggggagtctcctccaaagggagtaacgagtatgggactcgctcccgttctcctttcgtaggagacaaagggatccgttgacgataatcgtgtttgagcgacctgccttccgggtctttgttgactcggggtggtcgtcgtcaatttcaagataggcttagagggagtgagtagcgtccggtgtttcggacccggagaaggtctgtcgacggtcccacctgagcctgagcgttgaccaccgtcatcctttcgatgcacggtcgagcccgatttggtcgatccctcccgctctgtctcttcctgtagactcctgttactccctcggagggcgttcatctgaatcatgccaagcgggatgaccaactcgtcctttggtctcgtccactgagtcttgcccgtccctgtgtggtagtaataacttctcccaccccgtctctcatcctttagttcccaatactcgccttccaatcgtctgggaaggaccatcgccccgacaggcggatcccacgaacagtccccggtggctggacaagcgtagaacgtgcatgctgtggccggatcagagagtacgacccagaagttggctccccatgctgtaggcgtgtgttcgatggcggctatcaacgagccgacgtccaattcgtttggcagcgaaccatcgacagtacggtcctggtcgctgtcggcaaaccgagcgtgcggcccgtcctccctggtcgattcatccggatcctggccgaacgttaactcgctcgcccggacgcctcgagcgtagtcctcggtctcgtctcccggggtactttcttcagacagaggatatagagagctctcgtccgtttgatcgacgctggaccatctttccagagaacgaggagaaaccggactgtgaagtttgcgagactttggtgtggaagtgatatagctcatcttggtcgctgaaaggcaatgcttgacatccgttttctgacgagaggttatggatacgtccaggtccccccgttggagatgaaatgtcgatcaaagtagatgcgaacgaggtcgtcgatcattactagctcactagctagtgtcttgtacctccaagatgtgtcgagcaggaaacctgcagagatgtttccccactcaccactacttcactcccgtctgctctccacctcctatacctgactcgctcacgataattgatctgaattgatcgaatcgattggaatgatcggatacaaacccatttcgcggcaaaaacaaaacaatgatcaatatttaccttgatggggtggatcatctcatgattgatgggtgatcaggagtgatccgatcagtccgtactgaaacttgcccccttgatcccagatatgaaactgaattcaatcacgcgtgggaaaacagagaaagggtactctcagtctcgggctgaaacgcgggaacggagatggcgtagagctgaggggtcggcatctacacggtccatacgcggaaaggaacattggcgggcttgcctgtcttgatgtcattcgaactactcgcccgtgcgaatcctgttcatcccgctgttgggtacgtggacttgcactgattgtaaaactttgctagacgctctctcgaagccccttctgaagtaggacaacacttatacaacttctatgtatacagctcgggaatttcttcgatacacatggtttcgctcctgttgttctctgaatacgactaaaccaggtttcactccgcctcaccaccgtatcaccggcttgatatcctcctcctcatcttcctctactatccgatgaggcgcaatcggcgtcctcaaatcatcctcgtcgtcccatctatcgtctgcatactcaaacgcctgccgccgcttccaagcattgttcacggtcaacaataaatcctggatgatcagagcgtgtcgatatcgttcctgatgtgatcctcgggacgtgctcggtcggctgtcgagacccatccggccgacatgcaggacaagcgcttcgtcatacgaccgtttcctctcgggtccaagcaaggccgtgatactgggcagtctagccgagaatctcttgtggtccccactgtactcggattccggggaaggcgaccgggtcctgctcccagccgaatgggctggactggccgtccaacactcgtccccgaaacctagactcctcacgcccgtcagatgaacgtctgagggtttctccgaggaatacctcagcgccggcaagacatatttcggattcatctcggcaggagggaaagcgcccttgggcagaggcggcgagtaggagccgccgaacgattcccgcttgacgtcccgcatgggactgcccccgcgggacatgggctcgggcttgacaaagtccaggctattcgtccggctcgtctgtgaagcaccgagcaggttgacgttccggtacgtattcttgccgaaatccccaatatccagcttggccggtggcgccgtattacgcggtttggcgagctgatcaaagttggcgaaattgctgttctttcccatcgcacccaaggcgtgcgagaagtcgaacgaattgctctgaccgctagaatggccgtttccgaacggcttgcctcccatcgccccaccaggcatggacgcgcctgacagagaggaggcgagtttccgcagagactcgtcgtcagtgctgcccaggtccccgtcgcccggtcgatcccgcccagaccgtccgcctggtaaggctgcgatgggtcgggggcctgattcacccaagtcgctagctgtgcgaatcttgtcgctggggtagatcgagctaaagtccacattcccaccatggtgaccgctgttgggaataccgggtaaccccgcgagaccgagtgatgccagcgtagccgggtcaaacatgtcgtgaccaccttgagattctgccatagaagacccggacgaatacggcgaaggaatgtcgttggaattttgacgatgaggctgtctgggcagacccaagttggaagcagcgtccttgcctagtgagagcatgaacgcgttgaagtcggctaaatcttgggaagttcggatgttgttcaggatgcccatatcctgagggctgaaatggtttgtgtcgtatggcgaggagtccatggtgacatcaggggaattggcgaatatccgttgattttgcgttcgcggggaggccgaatctggtgcatgggatggcactggtacctgctgaagcgttacggcgagctcttccaagcgatgggccatggctatgaatgcagcgcggtcgccgatcagctgctattccgaggtgaaggctattgcaggcacttaccagcatcatatacgggctcaacccgtctcttcttgacgtcttgatacaggccatcgatcgcgccaaatgcgctatcgtgcccattcatgccgtggtggaaaccgcggccatgaccttgactaccaggtgagccgggggaggggcgatcctgctcgccgacaccaaggaacatgccaccgttctcgtgtcccgaaaagcttcgactgaacccttccgcaccgttcgagccgccttgctgggaattgctgtaccgcccgctgttgtgtcctgcgctactgccatacgaaggctgatgtgcgagctgcaatagctcctgcctttgcaatctcgctagctcttcgtattgtgctcgatgtcgctccgccatcgatgccggaacgctgacgctgaccggaatgtctacgaaaggcgcttcacctcctgtacgctggggctggaaggcgccggcattttgacccatcggcattgatggtccagccgacgagcccccttgtactccatcaaagccaagtagttgagggtaaagattgctgttgggctggaacggagcaccgtgcgagttgaaattgccaaatgcagctgaaggggggaagtgggcgtgttgttgcatgggcgatatcgaactcgagactgatgacaaaaacgagaagactgagcatccatgaccgatatatctactgctaacgagcaaactcactgctgccgtgacgactgccaacgctttcctcgctttgcctcgagctaaagctggctgacctcgaatcccggacgcctcccatcataggaaccaactcgcccgaactgtcccgtttcctgctcatgccgacattcgaaccgccgaatatgggacccgaagtgtcgcctaggctcggtgacgtccctgccgagctaccgaagccgttccctcgacctgctccaggatgaccgtaatgatgcagagggatttgtcccgggtacgctcctagccttgccgacctcgaggaatcgctctgctcatcctcgctggtcatcccgccgccttgcctgcctgatgtcccgtccgtcaaacttccaacggaatcgctccgggctttgcccgccttgcttcccgagctactgccagccttggaagattggctatcggaccgcttggcgctttttcgcttgaccgtctttgatgggataacgacccgtccatcaccgagtgccatgggcgccttggagtgcttgtgcagcgcgtgatgttcttcagtgtggatcttttcgtgctttttcagatcctggggtcgcttgaaagactttttgcagataacgcaacgatgaggtttcaatggggtgtgtactagtgacatgcgaaagctaccgtcaataccgaaatcggacagtccccacgatcacatgtggctcacctcgcagatgactcgtgatgtgatctcgttttgcacagaccacgccacatccctcccaatggcacgtcaagcacaagttgttggtagatttcctgccaatgtggtcctgacaaagatgttcatacaagtcttctggcgagttggccacgctgacgcatagcaaaagatcatgacaagatcagtctctcgtcccagtctcccggatttacataacaggttgagcgatactcactgttggcaatccttccatcgacagtaattacccaggttatcggcatctccatcatcactccctctgcgtccatgcagctgtgcgtatgtcaaacctccttcccccaattctggatgatccagcatgttctgggggacgccgggggcgtaggaccccgtcggtcgaggtactggcatgggaatcatctcgttcttgcctggaatcgttgatctctgaccagcagggtgggtgggtccgaccgaaccgacggaagatccctcggacggagtcctgatgtgatgacgttcgcgacgttcgggttgacgggaatatccagcgaggtcggtatcgatattcaagctgagggtattcaaatttgggttgaggttgacaggtaccgcaggatccgtcctcgataaacgtggagaggcagacgatccgttcggattcgggttcgttcgagcgacagggtcaaagccgagaaagttgatccgctcgcctgtcagatgaagcggagataacaagctggaatagggattcgtcgggtccaaggcgtaaggattatgatgttgccctcgctgggtttcgtggtgagcctgggaggactgcttgggtgtggtatgggtagtgctgccgatactactaccgctcagccccagatatctgtcgccgtccagagagtcgttgtcgatttcaaggactgaagagctaggtcgagaacgcgaggattcggttcgatcgtcattcgaggcccctggacgatgacgttcgacattgttgtccacgtccatcttgatgctcccaggtcacctctcgtcagatgttatcgctcgtcagacgagcagagacgtctgtccccggcttggtacggagggaagggaagacgaggggagaggagcaaggatctgccctctgactgcggatgatgtcgactgcctgttgtcagcgtgggcgcggtggtgaatggggtccggtcgatccgccaagacctcgtgttcagagcacgagcagaggtcgttcttgagcttgagcaagaggatgaattggccgaggtggaagacaaggactatggtgtgcgtgaggaggcgtgtgaggtgggtatcgtggtcgtgccgggtgcagagatgacgaacgaggccaaacggacgagttgcttggcaaatcaatggcaaagtatcgcccgccgggacttgactggcgcgaaatctgctcgctactcgtacgaaaaagggaaacgacgaccgggttgggcgcggatggtcaggggatgtagggcgagcagctagtcgagtgcaagcgagaactagaaaggcagacgaactctctttgcgctttgggcgacgattcactcggccaatcgacgatgccggacctcaacgatattggtcagatcgtagtcaaaactcgagcgtaaaaggttcaaggctttcggctcggttctgtctacacagcgtcaccggcgccaaaggaagcgggcaagaagacagccaccgtcaactgcgagatatcgtatggcatgctacatgctgagtcctcccggttccgacctctttttcccccctcctgaagagcagccagaccgtgccgagcccaaacctagaccagccaagatcgaatcaggactcgattgccatgaaccggcaggactcgacggggacttttctcctctccttgctcccgctgaccttgccgagaccgcgtgatcagcttccgctttgatccggcacgatcgctgcgggtcagaggtaggactcgaggcacaccgtgaccagaaagggtttcacttgagcgagcgatcgctggccactgctatagcgaaatgctttctcaacttcgagctgcgatcttggtgaagactttgcataggacttgggaccgcgcatcgggttggtcttcagactggaatgatacgtacgatcgcccgaagagcgaccctaatgtatttggaaacccatgcgacgtatcgcgcgggcgccggctgtttgcagacagggcccaccacgcggtgatcatcattcgatcattcgggcttcggtcatctcctgcacgacccttctatttccacgacctttccaccgaacctttccacgatgaaacgggttcgacttctgcctccctttcccctgcctttgtagccaaccggcccgatcaacaggaaaggatcttccagcttcgcatcaacccctatctcttcacaactatctctcgtaaaaggatgatcgctcgatcactacccagcgctttctacgatgatcagcaatcgaacgcgaaccttcgaaatgtctgatacccgccccgtcctttgtaaggagaccgaaagggtgtctcgcttggagagcggagcgaacggggtcgcgatgaccagcggcatgtcagatgttgtcataagtagggatcgctcgccgctggccgttcatgtggagatggtcagcaataagtagccatccgtctgaggtccaaagtgagccaagtgacaactagaacatcgaccttcatctttgaagtacaacgcaccggccaaacgctgccgcacattctcgctctacgtgtcaggataccctgcaagcatgtgtcatcaatcgtaagccgtttccctacccgtgtccagccccacctccgttgagcacctcagactgatctatctccatcgccgatgaccagccccaccgctcaactgttcgccgccgtcatctccttactgggaacatgcctcgtcctatggcatctatacaagtatgacggtttccgctgcctgaaacccacgagaaaagacgcgttccgatgcgtcatcgtctggttgctgttctctagttggtgagtcgccccgagcagcagtgcctttgggggaaggtgatgcatatttacgtatcaatcttttgcatcttcggcggtgcttgaccacagtatactggtgagtctggagcctatataccggaagcgcacgtgggcaagctgggtccggtagacaggctgatcccgcttcggtcctggacgcgtttcacgccacagttcaacattggagactgggtgagtgcgtacgtcaaatacgaggagtactacatctaccttccaaagaccggggtcgtgagtcatgatcgctagggtaacccatcagaactagtgatgatttccccctggtatggtgtacacgctctacagatcgtcaagccttaccagctctggacgtccacgcacgtcaccctctttcacatctcttactactgcctgacggccgcttggtgtttcctgctcggcgtccacctggaggagttccttttctggaattggctactacaagtcatccgaactcagcagagcaagagctggttcaagagcgtgtacttcaagttgtggtgtctgggatgtatcggaggcgtcgggctattgttcggtgcggcgacgatggaactggatagcttgacaagagtgggtcgtgattttccgatgtcaacgttcgcaacgctaaagtcccggatgtgctttgcagattgaaaccaatatcttctttgctggtagcatagcttcgttgctgtaagtcgaaggcgctgtccgaatgaacaggcgacgtaagctgaattattcgtacccgccagccttactattgggagcacctgggtgtggtgagtgggtgtctaacatttcggtccagaacatgccttgatagattttagtcgacagttacaagttccctgccttcatccgagaatcggtaagcagaagtctgcagctttcatagtcgacatgaccctgatgctttccttctagcgccgacaaggggccaacggcgaggttatcggcaagctcaattatttccgccagatgaacaacgccaggtcggtaccattggagagagatttaagtaataagactgatctctgctaccttcttagaactgcgttccgtcttatctacacgatcgtcctgttgatcttgtcgtccgacggcctgactgagcacaagaccatcaatcatcacgatttctgggtagacgcattctactcggttgccatcttttgcatctttacatctactctgctgtccctctttgtgagctgtcttcgacgtcggagattcatccgagggcctgattctgaactcgctcgcacgctacaggtcctgctacctcggggtggcggcaaccaccaggatctcggcgtggccaagaataacgtctacatccgggcgcccaacccagaaagctttcatgggatctctcggagccatggcagtcccacttctgccgagagtttgcctagctaccgctcacctaacaacaaaaacgatccttggggagtcctgggagaccgtctccacctcgagaaggaagacgttcaagagcttgcggcgcagcataaccaaagcgacattaaattgccctttgcctaccggaacaatttcgggagcccagctagcatcaaaggagacttcgaggcagtcgatcgacccgaatttgatactcccaaacatcagcgagtggtaagtaaggaagaataacgcctcagacacatgtgatccaggctaagagatccgggctcacaggttcaaaacttccgaagccctttggatttccagaacatggatttgcctcccgatctgcgggtggtcatgaacaccgtgaccgtcgagaaacaggactgaaaggatcttgcctgaaatgtaccttgcgaccgcctgtcatggaaccagccaccaatcttttccgtgtggttgcaattgtctcagcgggatctttagaatgtatgcagagctgtactatgagagcgcatggcctcaatcgaactcgagctcaacattccagtcattatcgagaaaacaatgtcgagcgggtacccaatgtacccgatcctcgctggtctcgagccaagttatgaaacgagttgagacaatacagctacatctagcaatacaacgttcaatattcagccggtctccaaaaacccattatctatcggtcaatatccattccgtgttcgctatcgcctgttgcgtggccctgcgaatactggccattgccctcgaagatttcctgaaatttgatgaggtcccgtgtgagatcgtccatcatctgcatgctcctgctgactcgtgcgtggtccgttgcatgggcaccattcggctcagcagccaggtctgtatgacgtggttcctgagcaattccttccagtccgagcatcttggccctctcgccacgagcaacctcttccacctgaatccttcccacgtattcaagaacggatctgacacgcttcttcatttcgcccacagtcattcgcttgcctgggtatttgaccttggaaggctgttcgaagtgcgtctggcgctcttctgacaggggatcggcagccaaggcagcggcagccgctttgggattggtaggtcgcggtgtcatcaattcaaggggttcgggtgtcggcgtgggtagcacatgcgagaacggagcgaggtggtcaggtaggccccaggacaaagtgccgaccccgctcgacgtagcaacgggaccggtcactggggtaccagccctagcagttgcattggcaaatttacgagcttcagccgcggtcggaggcttcttttgcggtgaaggatgcgccttcagcggaatggggttaccagactgtccgctcttgggacggtatgtatattggttgggatgtttcgctttcaagggcgccgatgacgaagcgagacctcgatcgatgccggtatctagacatttctgctcgtcagcgcgagaccggtcgcgataaagactggcaagaaacataccttcttcctcctcatccttcttcttcttgcctttacgagcggctctctcatcctcgctctcttcttccccatcttcccctcgactccgcttgatccccctggccctcttatccttggccgcttcgtctcctgcatcctcgtcatcacttcgcttccctcgtttggccgactttgctttgtcgctcgtgctgacgggagcgaccgaactgggagcagggctaccccttccggattccgcaaggctggctcgaatcgctgcttcataagctgcatcacgggagttcatcgtgctacgtttcttggccgtggcggtccccgcgagcggtccagaatcctccgagctgtccgtgctcgtccgtcggttcatcgagggtcgcctcttggcactcatgccggacacgctttttgcgctgggaggaggttccgtttgatcttgtcgttcggatcgcgcattcccaccccgtttgcggttctcgttactcgcgacgctagtattgattggactaggtgctcttcctccgcgctggcttctgctactgttcgacgctttgtgggtgaggctaggcggggcaggcgctttgcctttctttgagtcggcccaacgcttcgactgggaaggcggaatgcggtcggacgggtaggtatggtgttggagatcggccggggtgggaggtacaaagggatcgttgctggtacggaaccgaaagttcagctcaaagtccactctgcgaccgaccgggtgagcagactcactggttcttccagcgtaacttcatatacctcaagagcggcgagtgcaagcctggccgacattcgtcgcaaaagtattctgcccggatccgcgcatgtcagccttttgaccacgcaacggtcggctagtatcggtcactcgcttaccatccggtgcttcctcgtctccccagattccgacgcatgctccatgttgccagacatcacacccatcgcaggaaatcatcatgacatcgatatctgccgagcgcgaaggtcatcatgaaaggaaatgtcaaaggggtcgtgacgaaaggaacgatagagccagagtgattttaagatcagcttcgaatcctttcggggatgcaagccaagcggccggagcacacgccccgcaaccgtcctgcccgccgacttaccgcctcgtccacacacgcatcgcgtgatatcacctcctcctgcgccttccggctcaggctcatcctcttccaagacggcaggttgtcgagcaacaacgggcttttcatcgtcctgtgacatggcctcgagcttgctactccttcgcgtctttttcacgaagtccatgttcggagcgatggcgttgcttgacgacgtcgaaggtttacgggccgcggggacaggaacggcgatgttggtgtcgtcgaccactgtctccttgttgtctacgggaggcggaagtaccggatcgatgacctgttcgacgggctccttgttatccatctgtccattcgaggaatggtcaatgtccatatctacatcctgttcttcgtcctcgttgtccatggtaagaacactgcttgcgagactggccatccgctggacccgcacgggtcgttcgagcgtgttctcagtcgggttgatagcatcctcgacgctcgagtcgaccgtcttggcctctgcggctgtcgagacctcgttctcgttcggttgattgtcttcctggatagcctcttgtttagcagtaagaccggcgtcggcgatggtatcggcatcggcatcaacgtcggcaacggggacgtcgttcttgacctctgaatcctcttgctgcggttgtgcccctgatcggagtggcctctcctcgccccggggagcgctatgcacagtaggtaatccgaatccacgctctgcgcgttgtcgacgagcatactcgacccaatcagacacgtcgtccttgtcatctaccgccgaggtcgatgccgcggccgtggccgtaacattgagatcccggggcagcttgtcgcgggtgattctgttggaccgttcgacgaggctggtatgggccggcgtaggtgtgggaggtaacgcatcccctcctgctcctcctccttctccttgtacttccccctcctcctccgaggacgctgaagatccttcctcgagccagttgatacggagactactcgtcacgctgctttccttgtcacgtctcgccccgcccgcatccgagtgcggggaccgtttaggcttctgacgaggcattttcgggggaagaggcgggaagagcgggttgtcaggagagttcttggggagtggcccgatacgtgctcgagtgggacgtcggcgggaacctgatgacaaaggcggagatgacgcgatgcgatacggtacgttttcggattagcatagcagattcactagaaagggcctaatgtctatttcttcgactcactgtcttcgccgtctccgtcggcgctggtgggtgctggtgggttgttcgtactggatcgtcgagaactcatgttttgtctatcgaggggagaacgtgcggctggatacggccgatccggagcgagctcgacaacaggccgagttgatacaccgaatcaagaggagaggatggtgctttgaagagatcccgagtgaggtcgatttgagccctccgtactgggtcgggatcgcggtcgatttccaggtgatcagctggacgccagattttaacgtcgatcgaccagctgcgtgggaagaggtccacgagctgtgggcaaggttgtcgtcgggagtcgaactgattaaaggaagagcgtgtctatgactctcgtcgcactcgtccgggttgaggtgtgcggatgagggcatgtaccgagctggacgtttgtcgaggttcaagaggatgatgaccatgtcaagtcccgttcgctgctgggtagctagcccatgcatgctagtcgacgacgacgaggagaggttcgctcggaagcaaatttctcactttcggcccaggccgggtcgggctcacaggaaagtcaaagtggatggatgaacccttgtctgtcagcatggtgtcaaggctttacatcctgttcagtcaggtcacaaagctgtagtcccgtcatgtctaatggtcaggcggagaagacgattctctggatagctgcggccaccctagtcctcgggttttcagcatgggccgaacgtaaacttcgaagagcgacccccgtggacgctcggaatgctcggccggtacagttgacgaaagagacaaaagttggggacaagatcgtacacggggtaatcggacttataggcgagttcaatcatcgccttccggccgagcgatttgcgtctagcagtggcggggtagctaacgatatgctgatcggttcgtcaggtaatactcctctggtcaggatcgacagcttgagtgacgctctcggcgttgagatcctcgtaggtctcgatcaaatcccgaaacctcgaacaagctctgtcaacgtacataagctcactcgtctcgctgtgacatctggcctctcatgatagggcaaggcagaggtgaactcgacaggcacacgatccactagccatgtgccgtcgctaataccctcttccctctagtttctcaacccaggaggatccgtcaaagaccgagtggccctccaaagtgcgtttcctcttcagacaaagcgctttcgaacccgaagttgactacctagcctacggaatcacagtcatcgaggacgcggaaagggcaggtctcttggtccctaatacaggctcgaggatattcgaggggacggtcggtagtacaggtgcgcagccattcaacgctctcaccatcttatcacgcgatgcctaatggctagatgttccatcgtttgagtcgggtgcagggatctcgatcgccaccgtagctcgagccaagtgagccgagcgcccttcttgcgatctttgaccacacagctgatcttgcaacatgcaatccctggttaggggttacgagacgacgatcatcatgccggacgacgtcgcactggaaaaggtccaattggcggaaatgttgggtgccacggttgagagggtccgaccaggttagtcgagagcgtttcacaaacataaaagataatcgtgtccttccgctaagacacgtgtctactggtaatgcagcgagtatcgtcgatgagaagcaattcgtagtaagagtcctcttgctcccgaacacaggccgcgctctttcggagctgactctgtccttttcctcatagaatctcgctcgtgcgcgcgcggcatcgttcacaggggatgagggcgaggtgtatacccactctggcaagacgggccagcctgatctcgtattcagcgaagaagctgggacgtcgaacactcgggctagagggttgtgagtcggaggggacgtcgcctaccgggagcatgatgtatcacctgttgacggtgccgtaactcggactattcagtttcgcagaccaattcgaagtaagcagcttatgagacgtcgcccttcgggggtatctaccgagctgacgcggccatctcacacagaatgaaagcaacttcagggcacattatcagggtacgggaccagagatatgggaacagacgggcggcaagatcgacgcgttcgtctctggagcaggtgcgttcgattcgacttcttacgcgtttccgcggggaccacacctcgggctgaccatgtcggcccgataggtaccggcggtacactttcgggcacatcgaccttccttcggagccggaatccagacgtcaaggtcgtcctgtcggatccggagggtagcgggcttttcaacaaggtcaagtacggggtcatgtttgacatcaaggaacgggagggacggaaacggagacatcaggtcgataccatcgtgagtcccaccatcagctctatagactggggaactgactgacgtagccgcactcgacaggtcgaggggataggtgaggaagatgagcccaagttgaaccatccatcttgtttctgacgtcttggccgcggctttcaggtataaacagggtacgtataccacatgtcgatcgaatcgactggtgctgacgtttgtttgccttcgctgagctacagttgacgcggaactttgacatgggtcgacaactggtcgacgatgcgtaccgcgtgacggaccaagaagccatcagcatgtctcgccatctcgtcctgaacgacggcctgttcttgggctcgtcgagtgcatgcaatttggtggccagcgtgagactcgccaagacgctaccaaaggggagcactattgtcacgattctgtgagacgagccgtcgttgtggtcctacttatccgaacgctcacgtgctctccttgatcaggtgcgattctggctcgcggcatcagagtaaagcgagttgatcgaggcgtaatttcatgagttcgacgggatgaagctaatactggtctcatttgcagttctggtccaaagaatacttggccaaggccgggtttgtagacagtccagatatcgctagcttgatcgcgtgatgatctactctcggcgatgcagttatcggctgacttatcggtccgatgcgtcgtgcaatttcccgatcccgttatgcaaatggccgacgccggccccgatgccagtgatagctgccctgctcgtgttccagtggaatagagtcgaccagattgcgttcgtaacgcaagaatcgtcatggtcaagaaccagccataacggggtaagatggtgtcctcggcaaggacggccaaaaggaagcgcaatctcgcgaaaagcccctctttcccgcgcttggaaggaaacggtgtcgcgctgcgccgcatcagaggctggagacgtgaaacagggtggctagtgtagccggggcccacgtaggacggtgatggattgttctattgacagaagatcgaggatggattgatcaactaagtggcgagtggagtggccgtgggtcagaagagccaaatcatagccgatccgagtttcggcttcgggcatgacatcgcgacagagaaccggtgatctcgctgttcattcccgtgagcattacacgacaacaaatctgagctaccaatagtcagtgtcagtggctagtggctagtggacgagatatgtagttgtgcaggaaggtagatcagaccagaccagatcagatcagatcatggtcccgggattgtcatccattccgttactttccgctcgtcaatgcacctctatcggcaggccatccaagtcatcaatgatggaaaggatgagctcggtgctgtgtcttcctttctttgttcctggtggatctccagtccgattgatacgggaaacccgacgatgctgtgtcgaagcaccgtgtccgtatcccctgagacgatagatgggcgtgtttccaaggatcatcgccgtctaatcgtgacatgacgcgctgcgtcagtcagacagcaaaaagggatagctgatgggatcgtaggtggaaggtcaaggatcacactggtatccatttcccataggtccgcagggatcggtcaggccagccaccaaatcgattggcaatcacctccggttcgagcgtgaatttctagaactcccggcaatgacggggccgtgttaaacggcctcggcgacgatctcgactttcagagattctgagtgctgtgtgacgttgatctacgggtcgacgaggaagttgcccgggtcaacggccaatggcagccttgcacgtttctcacttgccgataacggtgtggtgcgatcaaggtctctctcgccccgtaaacgcacagcccgttggtcatcctcttgtccttaccaagatctgcctgccacgttgttgcctcgcatcgcctttgcctatagtctgcggcagttgactcgttatcgggtgcgtgcgtgcttgcgtgtgtgcgtgtgcaaacgatcatccctcccgtcggtcccgtggcctcgttgtccccgtgttcgcctcgtgcacgagtcatgttgaacgatgacgagtaagcaagcagctacgcagggcatataaagaccagatcgatcctgaacgtccgtcttcactgctcttcgccacttctctttcttaataccgcatcatcacgaacaagctcatgaacacatagtgtagcatcacacttgctaccatacatcgctgaagcactgtgagttgtcacccgtctttgctctcgttttagcagcaggatcgccgagcagctgacttgtcgataatcagcagcagtccatcacttccgtctcgcctctcatcgagaacagacacctagagctgcttcatcaggctctgacgatcttccaactaaacactccacccagcccggttagttctgcgatccccacccttacactcgactcgtactagcgatattgataccggattcgcctcctcccacaccatccctcagcgtttcaaccatgcactgggcattctggcgaccccgcgaacccgaacctttcctccccgcctacgtccaaccccgtcgttcccgctggttctccgggcagcacgcccacccccacggacatgcccatcacgctcaacaacgggtccctaacctagcgagaggcggccagacggggtattactacacctaccctcctcccgggcatggcgcttatggccacgattacgcctacgcccaggggtacgggggtcactctgggtgggaccagggtcaagcgccattgaggacgggaggagggaggtacaagacgaggaggaccaaggtcatgttcggacccgccacggttcgggtcgttcgatgaccccgggatccggggtcaacatcactttgatctatcggtagtggtacatccattcctccactctgtccagttcgacaacttcgccaacaacgtaacttcgacggccgggagagctagccaacgatctacatacccgtaactcgtcagagcgtctcggtcccggattctcattcaacttgcgtctcgaacatatcgagcgttcccacgactattgcgatctggaaaatcgccgatgtcatcgacacgtctcgaatcagctgctagccatcaacgaatctctgattccggcatagagtttcacgcagccaagcagaacatcgagttcagcagtagacatcgcatcattacctaaagattgccgaccgcttagactccagcaagtaggaccacggttcacgcatgcatttcaatgagtcccagcgatcacggaacaccacttgatcgaccagatcccatatcgtaagaacatggatggcaggaaccgaatactctgtttccttcgtagactagatcgactggtccgcccggttcgtaacgatgagatctgacacgactagatatgagaggatcatcctttgtatacctgtaggccacatcgagccttttatgatagtgtaatacccctcgtcgggaccttttgattcgatatccatcgttgcgggtatacgcctcttgcagtcttggctctgttgcccatacaacacacgctcgaccattcaaccctcccatctgactaatccagcgtccaattccgtaaccacccaatatacctggcaatgtccaccgattcggggcttctcgcgacaaacgtttcacgggccatcaattccttgagctcgctcggtgacttggtctcgcagctctctcgccaacattcgaggtgttgagactcgacatccatcgcccgggtcgcattaccgagataagacagatccgtggcgagttgagtggctccgtgattcgtcaatggccgtttgatctcgggaagaatcttgctcgtaaattgatccagcagggaagaggtcgttgacgatacccaagtggaaaggaccacctcctgaggcagagtcgactcgagtgggatggtagcggaaccgggcgatttcgacaggcccagtttttcgttgatccccgtaaacgccccgacggtcgagatcgtgcgatagtgttgcggcctgccggtgtcctcgtcctgtgccgcttgactcatgctctgaagcagctcgaggttgacgtgcggtaatgtaccgagtgaaaagccgagaccctcgtcgtgcgcgaatccctcgaagacgcgcaataggtcgagcaggccctcggtgacggtcgagatcgtgtcggttggggacaacgaaaaggtcggcacgtgaagctctccacgtctgacgaccttgtcaggctgtgaccaagaaggtaacgacggataaccggacaacatggtctggataggagccgcaatggccttttgcgtggcagcctgtgcgtcctttgcaaattcgatgatcgacttgatggccggagagagcccttcgatcgacggctggccgtccatcagccggaccaaggcgagttgatgcagactggactgcttcaatagcgttggagcaccttttgtgaccccggcaatatatccgtcagtggggatcggcgcaccctgtgctagagcagttagtgaccgtgacgtgcgtcctacagccaggtcgaccatggcgctgtacgcctctactcgtcctttgagcttggaacagcttcgcagaaccccgagtccaagcttgaatgtggccaagtcgtcgccgctaccggcagtttccaggtccaaatcgatatcagcgagatcatccaggtcgtccagggcgtccctctcctcggcgttacgggacccgccaccaccaccttcgctcttgactccgccgacgcctcccttgagctccagcagcccttttgaatcgtgcaggaaggtttccatgaggaaactgacggcctccaataggtccgccaatgcgaaccccagcgtgaacgccgtgcaccgttctaacgcttcttcggctatttcaatcaccctcgagccttttgccaagagccgttcgccaggggctcttcctgccattgatgcgggttccgtaaagatgatttcggagcggagaagcgccgtaatcgtgcgtttctcgaggacgaggtagtcggtctggtactgcaagaatggctcgtagagaccggcatcccactgacctgttacggtctccacactagggaacgtcgtggtcgccgaagctgccaattgaggctcgatctctgggatcatgctgccccctgacaaagccgcggccccaaacgtacgcgacatccgtcttgaagccttcttctccagctggttctgagcgatggaccctgatcgagaacgtctaccggtggatgccggcgtgccgttcgacggagaagcggccatgtgacccggcgaagtcgtcagcgtcgacccttgctgcgggctagtctcgtagaacaaggcgtcgaggatgtcctgcacgtcttttccgaatttcaacgtgctctgccaagctccgaggaggacgttgagctcgccctttgagcccgactgtccttcctttccgtgatactcggcgacttgtgccaatcgacggctaaaagagggctcgagcgcttcgagtgtggattgaaaaaacgtcgagagcgagacgaccggatccgcgaatatgctcttcatcgagtcggattccgtacgcagggttgagaggaaggttgagaagaattcgggcaggaagacgaggaagaggcgagcggtgcctgagctagtatctgacactgaggagcccgcttcaacctcgaccagcttggctttgttccacatgtcgacgacggtcttcctcctagcattaaagtagatggacctgtactcgccttcccgctcaatcaggctgaagatctccagtaattcgggtaggtccatctgttccttttcatcggacccgtccccatcgacaagagcgctggaaccccgtttggtttctttggatacggggttcttgccgaccgctgccatctccgccaaggtcccgtccaattcggcctcgagctgattctgcaagctgaccaagagaccctttctgaggtcgtactccttgggactccgctggaacatgtgaatgctctcgctagcctccgccagtcgatgagccgcctgtcggtatttcccggaagagaggtagttggacgtctcgctctccaaagtcgaccacgactcggcttccctcagtaccgaacgagcgtccgagaggttatgcttgagcgtgtccaatcgtgtcaaccggtcgaggatccgggtcgtctcttcccgctcgtcagacgttcctctagcggtcaagctcgacgacgcacgaaccgggtcgggctgcttcttgagtcggctctcgacaccttccagggaccttcggaccccctcggcgctttcccgcatatactgcaggtcgtacgtgagccggggtacggtccgtgagatatcatggatagatctctcgagttgggaagacgtgtcttgcgtgaggatgctcaatcgtgccaacaggtccgagacggatctgtccagggttgggaggtcggtggtcaggctggaagagggcaaggaagagctcagggccgagttgataaagtctgtgatcgagctggatgcatcgagcgaggtgaccagtttaggcaggtcatttgatgccgatgtcgaccttgtgacgttgtcgtgctcgaccggcccggggtgtaaggcgaccatggtatgggctcggataggctaatactgctgaggacgtagtgaatgagaccttggatacctcggaggcgggcgttggccgcaacgatagcttacagggaatctggtctctagctgtgacgatacccacgtcacgtcttctaaccgtgtctctttgtcaggcaaaatcgtggtcgtcccgctgaaacgtacaaggctcgattaagccatggtactctatcttccagctgctattttgccagtatgcaacgattgttgcgagtctacaggagaagaagatattgctgcaattgtacgatactgtatgcatggttccctccgacttgaagtcgtctgttcctcttcctcgaagccgactcggcgtcgacgcgctcgaggatcaaacatctttggatcgacacagattcaattgatatgatcatcgtacactcgtgtagataggtacacttgcttgcacagcaactcgacatagtgcgaggtacggtagtagagcttgttcactttagctactccggagttcaatcgacacgagcatcaccggccacagcgaccgaacacggcgccttcgatgcgggactgacctcgtgacccaacgttcctgtcactctatcaacaaccccccggcctggctcatcagctttctcggaccattcagaaagaggaagatacatcatggttctgctctaccctaccacagtggcttccacctcgacggtcacccttctattaccaccaccgagtcacctcgacgtggccgcctcgcaatggaaccccgaggattttccttcaccccgagagttgccagccgattcgttcccctttgacgagaatgtgatcagagaggtcaccagtaaggacacgagagacgccgatgatcctgaggcacgaaagaatggtactgtggatggcggattaggggccgacgggacgacgggtcaagccgagctggcaaaggatggcacaacaaagtccagtatggaggtcgatgccggcccgtcagatacgatcgtcaaggaagaacacgcaccagctatcgagttggaagatggtgaactaccagaagattccccagaggacagtccattggccgacaagacgacatcgggaacacgacctggctcgaaagcaggtccctccgattcgatcaagcccgacccctcttcctcctcgggcccgattcgactcaccaaagcgcattaccatccaaaagtcatcgcactcgccaagaaactagcggagaaaaagggaatgcggttgctggtggacgggacgcggaggagcatgctagtcaagtactcggatatcaaagatccttccgtctcctcgactgtgaacgacgtgcccgggccgacccagcaagccgagacagcctcggacgacatcatacacattcggaatccatcttccaccggctttgcagctcgcctaggatcgataccgtatgagtccgcccctcacgcccacgtatctacccctacgccgatcgtcgaacccgtacccgtcttgccttctaccccgttaccccggaatgtcaagaagaaaaagggtggtcgatgggccgggcatatcaaaggacaatcccgtgcagaaacgccggtcaagacggtcgcccctctggcggtctcgtcgcccttcaacgttggcacgcctggaccgacggcggctttcacgacaggagttgggggaggcccggcggtgggagggcatcttgtgggagaggtggatctcatggacgaagctaccaaggcgcattgggaggaagaggtacacgagaggcggagacgagagtttgggatggggatcggaagtagtagttggtggtaggtcgcaattctggaatcattgtttaagcgaaagccgactcattgatgtcttggggccttgccctctttgcgactgggtaggaatcacctgctgatcgaggctcggagagagaggggcccgcaatgggacgtgaatacgcagtcgtaagcgatctttccggtccggggactagcacaaaaagtggcgactgactagaaataacgtcgtggaaaacgcagttggcaagtagacaaggggtctgcgctatactatcagtccacaagatcgcctccaaccactcccgtcgagctcccacagccgctggccccagaagaggcaccggcacccgatcagggcgtgcctctacagtcggggatgatgttgccaggtcagagtcctctgctggaccctcggacgggtttggtgatgccacctctcggatcaccttcgattccgatgccatcaccggcacatgcgtatggaagcatgccgctcggtcagccatcacttgaaggcggtcgacctgtgtcgtcttcgggtaacatgggacctccacctcatccagccatggccgtcaacggcagctaccgtcaggtttcggacggacacatgcggcaaagcgtgggaccgcgggcatcggcgacgccggtcatgaaccatcaaccgtcacccgcagccaacatgtccatgtctcccgcaccgtctcaacaagtccggccatcaccggccccctctcacatgggagttcccgagcagatgcagagacctcctcatcccagcttcttgccgccgggagtcacgatgcaacagcttgctcaagcacgacaacaccagcaacagcttcaacaacggcaaccactaataccccctcagcatctcggtcctcagggaggcatgggtgcgatgaacgtaccgccccacctggctactgcgggtcaaatgaccccgtcgagtctagttcagcaggctcagctcgcgcggtctcgagaattggagcagttcggtcggctgccgatgtctcagcttcagcaacaacaacagcaacagcaacagcaacagcaacagcaacagcaacagcaacagcaacagcaacagcaacagcaacagcaacagcaacagcaacagcaacagcaacagcaacagcaacagcaacagcaacatcagcagcagcagcagcagcagcagcagcaacaacagcaacaatcttcgccacaccagtctcagcagcaacaatcgcagtcacccgcaggacacggacccctcaatgcaaacggattgccgttcgacctgaacagcatgacgagcgcccaggtccaaatgttgatgcaacaccgtatgcaacaacaacagcagcagcaaaagctcgctcagctgcaacagctgggtcagttttcgaacaatgctggtatgatcaaccctcagaccgttgctcaagggatgcgcagcgggttccccaccaacatgcaattccccccgggcttgcaacctgctcagctgcagcaattaatgaacgcgcaaatgccgatgggcatgtatggtatgggcgggcagcaaggtcaaaatccgaacgccgggatggatccagcgacgatgatgcgaatgtcacaacagcgctgagcggttaccgaggaagccgaattatgtccatggcctgcatctctgtacatacaatctataattcggagcatcatactgccgagggatatcctttcaattccaatgctctcgagcgtaatgaccccatacctgattcgatgtcatgctcgaatcgccgcacggcacaaagtcggtgtctgcgatggggggatagccgggatcgatcttgctcacggccttgactgtgatggtgagagtatcgggttagctcgatatcagtgtgacagacctgcctggttcagcagacttgccaacgtcgttgaggaagaaagtcatggcaatgacaaatacgggttcctcgtcgtcgacaccttctggaaaggtcgtgcttacatagtcgctgatgatgtacgagggtggaccgtgtgagattaccaaggcgatctgacatgcccgtgcccgtgcagactggaacttacggaacgggcgcataagggactgccatacgaaagatggctctcgtcagttggtgactctgtccaatgatcctgcttatgacctacctggcacgtgctcgacgtcatcaccgctaccactatcgaatcacgaaatcgtcagcttcggccatgctgtttaccagttcagtcaatcatactcacatcggaccacaactgtcctcggtgacgtatccatacctgtgtacgagatcgctctcttgaccctgctcggattcaaagaccgtctgcccgtaagccagcctgaggaattcgagttctcgctgccgacggtcctcatagtcgagtcgctgcttgaccatggtcgagtcgaacgccttgcgcacgatttcgtcgccgtgtccgctggcgggatgaaactgactcgccccttcatcgttcatcttctggcacaagacccgagcgatccgcgcgggcaacgtgatctgaacgaaggggctcgaaaagggggaaatcgagtactgatcgtcgatcgagaacgcgcccttgaactgcgatttgaatgcgacagggttagtaagcaacctatgaatggtgcctgagatgggcgtgggcgggtgagactcgctatgtcaaatcgctggcatccggaattggccacgtaaatccgcttgcgcccgttttgcagcactttctcgtcgtagacggtcgcagggagcacgtcgtccatgagtttctttaaaagagacctatcgtctgtgacggggtatctcgacaagaaataattctgcggggcgtatccgagcacgctggagaggttccatcggtcaaacgattcgtacagcgattcagagatggctttgcccttgtgctacgacacgtgccacgagggtcagtcaagagcgcgcttcagagacgtgtacagagcggtcaaggcttaccgtgtcaaatttatggtcgggcacctgtgagtggtatttgaaactgcagcggattgactcggcatttttcagccgggcgtgactcgaaccggttgcgagcgctacttacgacttgcggttactatcgagataccgcctgaagacgtccatctcgcccgaatcgtttttagtcaagttggcgctacaggcggtcgatcgattttgtcagcctcgatattgacgagtacgcgatccgacccagactcacgaaacccagccgaccgtctccatgtatctccctcccgcaaacctgtacgatcggccaccagaagcacgatcaacggcggtgtatcgaacttcccagaatagctacgcctgacgccgacgcacgagatcgagttgccatccagcctttcacaattcctcacgtggttatgtcctccaaagatgaacacggggacgtcctcgtgtacgaccctgatggcgtccaagaggagcttccattcgctgtcgggtcgattgatggacatgtgaccggcgatcacgctgccgggaggaggccgatcgggtcagtcggaagacgggcgatgggtcggcgagggaactgacaaaaaatccggtcgatccttgatggcgtgtgcgaaccagggttcgaggatcatctccccgagaggctggatcgtggtgttcctgtcgagcgtcgaccggcttcagctgcgatgtacgagcgactcgctccgagcggtcgaaaacgccgactcacttggcgttgaaggagactacgtttcaccccgccagacgatcgagtgccagcttgagggatgagcgactccgcgtgccaattccagactgacgagtcggctcacagttgtataggacacccagcgcggtcacctccctacccctgaaatctcctcagcttggtatcagctccgttcatcaccccccggcattcacttctttcggactcacatcgacgtcttgaacttgctccacctcgccccgatcgacctgaacccctcgtcgtcgtctaacaacacgtccacattactcgtcaaatacctcgtccccaccccggttccgagagtggagggtcgtaacaaggtagcggatgcgcaagtaggtagtggttgttgtatataatggggtcgagttgtaagtcggggatgtcataggtagaagttgttgccttgtggttgtttcattttcgaccttcaactctattcctctctgtttgtgtttgcgcgtgtgagtcggttcaacgccggcgaattgattcgggatcagtcgacagagttgaaccgaatttgattccgctccccactgatcccccacacaccgacactcgctggcactcacccaaccacctgctactcctactcattacttgttcatcgacatcgatcggacactcctcgcaacagccccgacatcgcaatcgaacctcgtctcttacactcccgccttcaaacaaatcaccctcaataaaactctctatcaaaatggtcaaagctgtcgtcgcaggtgctgccggtaagcttgcccgccatgttggcattacagacctcccctcctgctccggttcggtcatactgacataccccacatccacccactcgctttctcgcctcttacaggtggaatcggacaacccttgtccttgttgctcaagcttaaccccatcgtcaccgaattgagcttgtacgatgtcgtcaacgcccccggtgtaagtctccacccgcccgtaccccagccagcgatcccttggctcgtcaacgtcctgacaacaacatcggaacgagccgaggcgatcgccttcctttgtcatcgacaatggaaagtaaagaccattccaacacgagctgatcatttccacctcgctttcactttatctccatcgcccgccacaccactcgacctctgatcgctgcgcccgccccttgccgtcaccccgacctctctcgcccacctcacaggtcgccgccgacctgtcccacatccccaccccggcccaagtctcgggtttccttcccaacaccggctcccaaggccacaagggccccgaggaggagaagcgtggtgccgtcaacgccttgaagggcgccgacattgtcgtcatccccgctggagtacctaggaagcctggtatgacgtgagtcgggtcgagcgtcaacgagatcggggtgtcggggttgctgactctcaaggtgccctcttcgcgcatgggtgtgtgtgttttagtcgtgatgacctctttgtgagtggcaagtggtatgcgcgccaggtatactttgactgataataacgattcgaccatgaaacgttctatatacgatgatagaatgtgagtctggatcccccttgacgaaagctgatcctcgtcaggactctcagctgacaaccctgctctcgttcccaaactcctcctctcgtccagatcaacgccggaatctgtgctaccctcgccgagtcgatcgccgaggcttgccctaaggcgttcatcctcgtcatctccaaccccgtcaactcgaccgtccccgtattcgccgaggtcttgaagaagaagggagtgttcgaccccaagcggtgagtctgtgcagtgatgcgacgatgaccgggactatgcggatccggggaactgaacctcgcccccgaaatagactcttcggtgtcaccaccttggactgcttgcgagcttccacctttgtcgctagcgtcattggcgagcccaccgaggcttccaagtacgtcatccccgtcgtcgggggacacgccggacacaccatcctgcccctcttgtcccaggccaagccctcgatcccttcgtccgtcctctcggacaagtcgaagcgtgacgcgctcgtccaccgaatccaattcggaggtgacgaggtcgtcgaggccaaggcgggtaccggttccgccaccttgtccatggctcaggccggtgccgagtttgccgacaaggtcatgcgtgctgctttcaagggagagaccggtctcatcgccccttcgtacgtcaacctcgaggctgaccccgagacggccaagacgatccagcaggagatcggcaaggacctcgcctactttagcgtcaacgtcgagctcggcaaggaagggatctccaagttgaacccggtcggcaagatcgacgagaccgagaccgagctcctcaaaaaggccgtcgaggatttggagcccagcatcaccaagggtgtcggtttcacccccgcttccaagctctaaacgagggggagtagggtcgtggcgcgatgcagacgtcggggttcgactcggcggcggcctcgcatgacccggcccgcgtgtcagtcagattcgtatgaaccggtgtagtagaattgctagatacaatatgagattaccaagattcgaaaaagggttactgcgacgatcgggtctgacacacgatcaagtgcgaagcccgagtcgtaatcgggtgacggggttcgggttccatttggtcgactgtcgaggtctgatttgccgatgatctgccaccggagctcggaagtgcgggtgatcaagtcactgggcggggtttcggatgggtgaccataggcatgcatgtcggtaggtgtcgcgctggtgggtgtagcaattccgagacgtcctccggagaacgcctgaacggactgcgtaggatgcgaaccgttgtaaagaggagggatcgggctaatatcataaagggaccatctgtcctcgatggtaagtaagaggtgatcccacgggtacttcccgtcgaacactgatgtggtgtcttcctccagctgcgactcataggtagcacaggctcaatctggacatcgtagggcagatggaggcggccgtaggaaagggctacactttgcccagagccttagacggctcgcccatccctttcaccggatacccttcccggtcgtgggatacgatctctcttcattaccggttctgccgatcaacatacaggatgatgtaggatgatctggtggtgcgaccgacattttgacaccgatggaacggtaacaggcccggcgatatatctgacgatgtgcctgtgagtcgactcgttgaaatacagaacaggctgaggggaccgagatgacgacaggcgaaaggatggaatgacgacagactgatctacacgaatggctagtaccctatgggtcggtcatcagaagccacgaactgcggccctcgtccgacggccagcgtgctcgctttttccggaatggtgacttgcctgctccggccaaacgagcggaggtggcgaattggttgggaagtgatttgccgactaaatactggttaagcgacccgaggactttgactgcggaattgttcgaaatgagacagggaactgttacggggttgctggcaaggcgaggcgaggtgggaactgggaacccagggagagggagagtacggggggctcggggatggtcctggggatagcggtcaatccgaggttggaaaggaggcaatccgagggagaggcaatcggatcgattgtaatagagttgttgatgagggagggaaaagtcgacgaaagggaagatgaagcagaggatgagggaaataccaacggcttcttgaactggatttgggtcggccaaatctcccctggtccaaaaaaatcttttgaatggtaatatgagatctactgacaggttctcaaatacgctgcgagcctttgtcgacgatgatccccctctgacaaggacggggctgatcacggcaatgccatccatcgtcactcgagctgcagccggcttcaacgaacagacgtccgacaagcccattgagtcggcttctcgacccaggtacttctgatcagcagcacatggtcgcgaatagtgtgatgatgtttcacagcggctcagcattgtcgaccatcaatccctccccactcgcggtcgatgggattaccgtttgatcggacagcgatctaggctatagctatggctataccgacttctggacttgtgagaacactccggggctactgagacacgtctatcatagcgtcatgtggtatccagagacgagacttgtctgaggatccaaaatttatagcggggccgaggagacggatacgccggtcgagtgaacaataatggtgcgatcgagatgtagtctttcagactttgcggtttggacggtgcgatgggatgccatgagaccacctcttggctgcagacgtctcgtcctaccagactaaagatcgatatcccccggaaaggagctgtcgcaccttacgacgttttgatgtgtttaccgagtatcaaacccgacgtccatcatccatcgtccatcggcctgaaacgcgtacgcatagtaccgagcggggagaacggggaaaatacgtatcccaacgtgattgcctggcagtggttctcgtttcccggatccgaaaggtttgtctgttcgggcgggcgaggtggaggggtgacgctggacagatgcccgcgttttgctgacaagcggcgaacgggatcagatcccccgcgacgcagcgagcgcgcacaaaagtcttgaaaagaagaagagagcgcgggatgacttggctcgatcgaaggtagcatctgggcctggccggcccgttgccatcgaggtggatcgagggggcgggcgggtagaagcacatgtacctaggacgagattctcgaccaacgtgcgacctggtggaaatagtgtatcgtgaggatgtgtacagaggccagaggtggtgtgactcgataaggggctaaggggtgaattctcggggatctgtgatctacgggatcaaaatggggtcaaagtggaggtggtgatcagtcgaactctcggttggaatcacctcgaagatgcgatggggcgaccgttgccggtggacgtggtcatcgcttcgtggtgggtgacgtgcgcggacactttcagagatgatcaaatttgttgcaaacgagcagagccaatgcaagtatgtattcaagctgtacaagttgacgttgtgctggatcaggaggatcctgtgtgaaacggcttcttggtatctttcgttgttgtgaaccgcggatatcctctcccgtttgactggtcactttgcgtgtttcctcgtgggtttcgcctctttgatacctgccgaacaggtgattatcaatcgacactcactcacctaggactcagtccccccacatacggaaatttagatcatcatccacatcatctcacatccccaccatagccgtcatcaacctagtcctgacctccacatccacacgcattcttcaccgagctttgacacttgcctgaattacaagtcaaagaccatctgcgcatcgaccctcccgacaatcgtcgacgcccgcaaaaggcaaaaaggcacagctctccagggacaaacgggcactcgaggaaatatcaaacatcaacccgatcccagtgtaccctgttcctcatccatcctccctgatcacagccatcgtcgacccggcgaacgacaagccgagtggtctctccactcgacgacgctacacacggtcagagcgggctcgtaatcacgctccatcacggtctacccgttccgaggttcgacctctcgagacctagaatcatcctccgagttgggcgtttggcgtttatcaggaagacgaggagcgagtcgtctagataaaaggtgggttctttcttgggactaggaggtccggttcgacgtctagagggaaaacgggccgggagtgctgagacggtccttcgttcgactgctcgttttcaagtagcacacatcctttcatctcgtcattccccgaagatagaatcgcctaccaagcggacgagctctcacggaacatcagtcaaggtcatcgattcacgaccctcgactcgacaatccctttcttaaccccaacaacccgacattcccgatattcgagcacggacaagaatgtcacactcggccctctccccgacttctctcgagttcatgtcgatcctcgagaaacaactcgccgcccaggagaatcagtcgtctcagggtaataatatcaacaacaatgaaatgtctttcagcccgagcgctttctacccttacctcagtcctggacccgatgacaacttgaacactggcctcggtaacaacagcaacagcaatgtcaacccgcaggacatcccgctcactcccgagatcctgaacgcgttcctgcaaggactcaattcggcagggttctccaagcaggagattttgaacttttcggctaatcagatcgggcagcttcaagagcctgcacagaggatgggtcagatgggacagcagcagcagcagcagcagcaacagagagggttcgtcaacccggctttgaccaacggaaagggcagtttcggggcgtacaacgctttcgacaccagttcgaacgggttcggctcgggcggttttatccccagcacgaacggtggcaatggcgccaacaacaacagcaacaacaacaacctgatggccatgatgatgatgatgaaccagacggccacggcgcctaacaaccagatccttaatccgcccaacgggtcttaccctcaaccgggggtccatacgcccgaagcttcggcgagtagtaaagactcggcgttgggctcgaatacgtcttccccagaagcggggctggggaatagcccgagctcgacccatggattagcgacgaggcagccttccgggtcgtcctccatcggggacgccggcgggcaggggaaccgcctctcctccagatcgaggaggaacagtcagaacgcacacgaggccggtggtgacaagaatgaacacaagcgcaaggccgaggaggaggagttgaccgggcatcagagtttgaggagacacatgggggaagatggtgcgttgccttgcgatccgatgtatatcgtaccggatgccgctcgagactgacaagacgtcacttctggtactccgtcgcccccgttcagactcgtcggcagaggatcactcggataatgccgcgacgggcaactcgaagcggtctggcgtgaaaaaggagacgtcgtcccgtcgaaaatccacggccaacacgcaagcctcgcgagaggaatcggacgctcaggcaaaggctctcaaacggaagaaccagaacagggccgctcaaaaggctttccgcgagaggagggaacagagggtcaaggatgtcagtctcgctgctttggttaatctgcgacgatgatcgcccgtgctaatgaacatgcgcacgcgcgcctatctgtatacagctggaagataaagtcgctgaactcgaagccaataacgccgggcagacgtttgaaaacgacaatctccggcagctcttgtcaaagttgcaaaaggaaaacatggcgctcaaggagcacaagtttacctttaacatgcccgtacctggatctcacgcgagcgaaccatcggtcggcggtcccagccgtacgacgagcgcgagcgggacgcctgggatgtcggtcgacaagttgcctagcccacccatcagctcgatcggaggaaatggcaagacgagggatcccacgcccggttcggtacgcagcaacacgggaacgtcgacgtccaactacgattcgcctcgctccacattcagcgggtcggatgccatcagtccggcttcgcgaccgggaacatcaggaggtgaaaatgtatttttcaacccggaaccttacaatgcctttgcgaatggaggggccaacaacggcgtcaacgcgtatgcgccatttgccagcgctgcagagcaggccggagcgatggccaatgttgatctgcaagccttgttgaacgccttcaaggtgcaatacggtcagccgcagactccgggtatccccgtacagccatctcctgcggcgcctcagttcaacgcttaccgggatgccaatggaagcgccgaaacgggtgacctgctcggcaacgagtttgacctgaccggcaacgtctcaatcgacgatctgtttggagacgacgagcccatgaaggaattttggaagagcctcaatcagcccgagtcgttcgaccctactgggctcgccgaagaccccttggtcaaccagaaccaattcgccgactcgcacggatccgtcagccctgtcgacgcctctaccgacgctggatcttggtcgcgaatcttgatgggcaaccgtccagaacatcccgacctcagcgtacttcgatcagacagcaacggttccgccaccggtccgggcggctcggtcagcggcgccagcgccgacgcatcgctctcgcccaacaaatacttgaccatgtctcccgactcggccattgtcgaaaagagcccgcttgatactgccatctcacctaaagccagcggtagcaaagacccttgtccgttcgccgttgggcccatggctctgtcgaccctgggtgagggtactgtggcgcacagattagcggtcaacggtgcgagaatgctgagtacacaggaagcttggaactcggtctcgagcaagatcgatgtaagtcgaccgatccgaggcattcctcgtcccgttcagtggatgttgacgtgttgtgctctcgattcagctttccaacggattcgacttggatgagctttgtgacagctttaagaaaaaagctcagtgcgacggtagtgagtgtcgagatgcaaagtatcagtctgtctgacgatccatgctaatcctggcctgtcgtttttcgttatggcagctggacccatgatcagcgagaccgaggtcgaccagatcatcgatgactatagtaagcgaaaacagctattgcaataggatgttgacagcaggacgacccttttatgaatttttgttgacgtggactctttacacgtttcgctctaacgctttcgttcaatttgtatgtatgtaccggatcgtggtagaattgtagtcccgaggtggaatgtaccatagatacatcacagtacgcacatacgattatcccatatcgtagctcgcggtctagaactggtccgactcgcgctacgtgttcaacttgccatccatcctcctccgtttgggaccgccatcaccctccttgctctggttaccacgtccccgtttgagaccgctgcggttgctggctccaaccgagctcaattcaccctcttctcggtccgacatttcaccttcctccctaccagactttttctgcgacattggcacagcgggcgtcgaattgccatgggaggatacatccagagtaggtcggttttgcgctggtggaccattcctgccgttcccgttgccgttcccgttgctcctcacattagtcttattgttgttaggaggattagcggatctctctctttccctggccagaggggtggctgaacgactgggaggcgcactggaggccgtggccatgttcagattccgcgacgtccccgccgacttggaaactggaaggtccttgtacgagcctaccgggcgattgggaagccctggcttagcgggcagagtcgtctttccatatggcagggccccgctccccgtattggaacgctgcatggccggaggctgtaccgagatagttggcgtaaagactgccgctttagggtcgagtctcttctctgccaggctatccccgttgacagaccccgtaggggtattctttcccttcgacgcaacacccggggccattcccagccgcgggctcgaggccctgctcagtcccaccacattcacgaccgcttccttttccttggtaggcagttccgacacggaacgctctggatcaactcggggatgttgaatgatcgattgtagagtctcgttgagcgtcctaaaggcttctcgccgggcttgcgcttcggcataataagcagccttcttcacttgctgctcttcgatttccgtcgtcacgttcgcaatcagcctagttgaacggcgccagcgccaaattatcagccgatgcagttatatcgagatcgcctatgagctacgcatgacttactggtccaactcattcctttgcttcggccggcttgatagctctttgagcttggtagcgaccttgccatggctctccttgatccgttcctgctccgcaagcatcttcgtctcctccttcaacgccaattcctctcgtttgatctcgtccaggaccgtctccaattggcttttatacagctcctcttgattgctggccacctgtcgagctctcgctaaacgcttgacagaaaccgagtatttatgcgactcgatctcgcgcaattcgcgatgcttggatgatgaagataccttgttggcatgttcttgtagcgcctctggaaagctcggaatagcagacagagcatggattttgcgagccaaggaccttggaatggtatcgggatgcgccaaatgaaaggtaacgacggcatctgcacatgtatagtggcagggagtcagtcgaggttgaatgcagagcgagccgctcaagaaacttctcaccctctaccgctgatgtgatgggctctggtttcaattggtcgacgtccatgatgactaggcgagagcttaagcaattgatgtagtaaaagtataccagtcaagcgatcagaagtagtcattggtatctagtgtgtacaagaggtccagaccttcaagggtaggacctggattttgcttccgcttccaagggcaaggaggcaactgatacagactcggtacatgctatggtcaagctcgtttccaagcatacggagcagtgggctagtttctcaaaagtgacccatagggcatagaagatatcaccaggggtaccacctgatcgtgcctgcgcaccaagtcggccttttcctcggcaccctgcaatcctcaagttatacgctggcttcgtcgagacacatttttcacctgcaaaactgagagaacgtccttgcctcgtcgtcgagggatggagaaggttggcgaagggcggcaaatcgatcagctagtcgaaccccccgccgatgcgatgatctggtgtgatgatgacgggaccgaccgaggtagggaagagacgctgatattgttccgttgcggaccgatgaggacttggtatttgcatgcatttcgttgtaattctggtgtacatttccgatatcggaacatttcctctacatcaagcgctgaccgtatctcagaaccatgatcaaggaagcgatctaggaagatccgccgtggattagtgcctatcgcgattgacaagcggaatgatgcgagcagacttacagcgactgtccagtgacgaaaggcacaggtcggtatcacaggacatgaacaaggtgaatcagctgtgttcaacactggatggtaccgatcgatgggtctaggatttcgcagactcgcgcccatactcgatcgaaaggccatgcggtagatttcgcgatacgagtctgttcacaccctccccatcgccctttggctgacgaggatggctcaagagcctaatgtggtatggaataggatgttttgttcgactcacccataccagctggcataattttgccgctcctgacgaatttccttcccataacgaacagcagcaaaagcgaggtgactgcataacaggggaaatggatgttcagtactaccgccattgatattgtggcccacgtcaaacaagacggactcagagaaaacttgacatccttgggattctgggagttgagctgcttgcccacgcgatagcatcagtacatgttagccagatacgtagcgaagaatgatcgacatgatcactcacgtaggctccgtatgcgagagctccgccactcgtcaacccggatctacgccgtcgaggtcaccgattttccagggggatcagagcataccgagacaccgaagaggaaggtggatgaaggaatttcatcagtccagggcgatatcaaaaactgtaacctgatctgtgcctgggcttacactagagaagcgatcgacctggctttgatgaagcccatcaaccctagagatgtaccagcgtgttcagcatcattcgcaactcctagaccttgagcgtatcaggtccccggactgacctccctgagccacaaaggcagcgaaaatatagcctggaacgcaagcgtaatgaatttgtgagcttgaagaccaggtgtgcggcttggccggcttggctgttggtagctaccgggataatcgacataaggcttggtcagaacagcagacattgctaaggatgattcgatgttagaggttccttagcagaaaagggttgacgatgacactcatcggctggtaagctggaaatataggtgcacgaacgaatgattccatgtttgaacgagttgtcgaagtggatgatgtcgtcacgctccgggctctgccgatcaacgcgctagacaaccgagacggacagctctgatagccggcgactctaacatcgatggcctttggtcgatataaacatcgatcatatagaaagggatacacgattcttttcaagctacatttgattgtttgaattcggactttagttctacttgtactgaaacttgtttgaatggttggagtgttctttcgtgggtcataggtgacgatctcactcggacccagtcggcgtagccaaccctgacgcatttgatgcgtcaaggtaaaagctgctccgacagggcaaagagacgaggctctattgagactcggcccactggacgagccacctgaaaaagtgcacggtatcacggtcagcgttgaagaaactcgacacgttccggacctcgccagactactcactgctcccagttctcccagctagactcgacgaggttaccctcctcgtcgtggtgctcgtgaggaggcttgaggacctcgggcaggatgtggatggctccgttgagcgcaaccccatcgatgatggtggcctcgacatcgttgaccttcaaagtggtcctcgaggctccgggtaggggcacgaccttggacttgtcgatgacgaccctgacgctggcgttggggagcatggtagggaactcttcctcgatgtggaagctcgaggagtcgtccatcaacaaggcttcgacctcgtcaccgatccaagacttcttctcgtggtgcttgtgcccgtggtgtccgtggtgggggtcccggtgtccgtgggtaccgaccttgtggatcgattctgtaaagacgacatacttgtcgaggatgtggtaaccgagcaacttcctcatgacgttttcaccgaaaggcgagaagaggaagaactggagcttcttgggaagcttcccaaaggcttccgaggtgggcaggaaggcggtgatggcggggtttccacggaagacgggacggtgctcctgcttggactctttaggggagaactcccaagcgacggcgctctgctctccgatctagataggcgacagggcgttatcgtcagcatttgaacacattcttagcatgacgcatggcgtggccgcattccaagactcgccttctggatggcagtggtgaaagtatccaactcccgggcgaagaaggccgaatcgagggcgctgggaggggggatcaaggggtgatcgatctcgtgcaagtacccgttgatggccttgcggtctgagtgggtggggacgaccctggcgtaaaagttgagctcgagcgagggaggcagggccttcttctcgaggtgaattcgcagaggctggccgtcattggcgccgaacttggggtggagggcggtactacaaagaaccgatcgagtcgatgatacatcagcgagcgagtcttcataggcaagcgttccgaatgacgactcacgcgacggtcttattgttggccaaatcggcggcgctcaggggttgaggcaatccatggtactttaagatctctccgaggataaacttgaagatcctcttcttcttttcatcctcgtcgtcatcgtgcccatgatgaggtcccttgtgagggggaggtccgggatgatgacggtgctcgtcgtcccgctcgaacaacctctgcgaatggagatcgtgcaccctcaagaggttctcgagggtagggctggattgcaagcgctcgatagcgtggtcgaacgaggcaaagtggtcgtggtcgtggtccctgtggtgagggtcagggattccggagttctctgtaggaggagttcgatgtcagccaggcgcagctcgtgatgggcatgacagtgacataccaggagcgaaaaaggtaatgctggcgtccctgtcatcaaggatctttttggcattgccaccttcgatctcgatggctttcaaaagctgcaaagaggcgtccagagggtcaaacgatgctacagggatcgatagcccgggaagactcaccttggagtacctatccttgtcctggttcagaagctgccagatggtcatctggtcatcctcatccttggtatcggcgcgccaatcctcttcaatgtcgttgacgatcgatttcacgaaatcgtccgccaacttgccagcgttcctgacctgatcgaaacccatcgacctgaccttctgccagtccgagatcgagagggtggggatttcgacatcggcggcggcgttgtcttggttccagggaaggacgagcgcggtggcggtgctcgccgaacccaaaagggcggcgagtggagcgagtgaagtgaaacgcatgatgagatgtggtgatctgaacaggcgttgtcgtcaaattccggggcgtcgatgtatctggaaccggggcggaaaggtttaccctgatgttatataccagagtaggtgtgcgtgtgtgcggcgacctcgggcggctgtgtgcgaacgttcgcaagacgattacatggttgtttcctgcggagaccggggatcgggcaaacaaggtcatcaaagttcggcaaaggggggcacaaggcagggcagggagagagcggggaatgtggggaatgatgacgcggcgaagcgggggtcaaagggaagaaaagggaaaaggggcccggtcatcgatctgtccgctgacccatgaccgaaccaaagaaagaccctgctctttccatgctgcctctgcctccacatcgaggctgacattgcgagagcgagaccttcctttcaaacgtaagcgcgcgatgatcgcgctttcacttggcacaccaagtggggcaagcatcaaatcgagatcgagacgcattgtcgccggaggctttggtgtttcaaggaagtaattcttcgatgatgtcaccgaccgggacccatgacctgacacccagtgacccgtcgaccacccatcgatcccaaagctcagacctctgttgaacacggcggtcgacttgctcctctcttgatacccaagaaaatctctgtaggccgctgcaaagtaaacgaaactactcgattacttgatgagactctctgccaggacaatctttgcaccggcactcgcacgcagattcaacccttccgtcaccaccaccaacctcaactcgactttccgaacaatgtcctctgaccaatcccagaagaacgacggtgagccgcttcttcctcctgctcctcatctagcgtctctctctgctcgcttgaacataccctgacccacctctcgtcgctccgccatgctcaggtcccttggccaaggtctcggacaccaccacggcctcgaccacgggtccgaacatgtccaccgagactgaccccgccaagatgcccaaggaggctctcgaggctgaacctgacgcgggggagcagaatcagcaggtgagctacaccgactggggaggggggaaccttacgcccgcacgatattgttcatcggggagtataccgctgatcctcaatcgctcccgcgtacccactcttcgcagcgtgaagatgctgggatggccgctttgcccaccatcacataatctccctatttcactgaatgaccgctcatcaagaccgatacagacgcacgggcgagagccagtatggagcacgaggcacagatctgacccggatggagacaaaaatcgaatcagagaatgagaaacaaacagtcacatgtatcccacccgagattgaatgagaatacgagattaattcaaggacatgtcggatcgtcgttcctctgacgaatgtccacagtctacccatctgacaaataacaagcttgaattgctagatccagctttttcccaaaaatcgtctcgctgtctttgcccaactttcttgactaaaatcacgcgccccaatctcgcgagctttggctccttgcccgctattggagtcctcctcgagaggcaagcccagctcgaccagttcgtctgggtagggtgcaccacgcatggcctgaccgtcaagagccaattgtcgtaccctgattcaagacgatttgcgaggagtcggtcgcacgatttgtacaagatcttacagcaaggcagagcgtggagtgccaagccaagctcgatggcttcgctccgaacattagtgctgtaacaccctccgattcggggtcaaatagtaattctatttgcggtcgccgcaaacatcgtctgtgatctagatcgacagcaagttcgtgtattataaaactgtaacgatcccgttctgcctccccgcttgccgagacttagactatggacgagttcctgttcaggttctgctgcgaatctcgtcctcgcgcgttgctgcccgaggtgttccttcccagaccaacaagatcactcaatggggcatcgttatggtgaacattgtctttgtggtcggtagaatcctggccgggattgatctcccagtatttctgtgacacgtcaaagaaatcgttcagatacggacacaacccggtgaagggttattcgcatgcagggactctactcacgatgtgcttcaagatgtaccagaaagcggtagccagcagagagcccaaggtaggtctattcacgcgtcacgatagtagcaaagatgtcagcgtgtgcaggaggaactattgagcaccagaaagcgtattcacccgagccctgtgtttcagaagcgagtgccagagcaatcagtctcaggttatggcaagtcacaagctcgatcgctcaaatacgcacagtaaatccagtggtaattttcaaagccttcaaagacagccggtccgaatgccctcgccgtgctattcaccgggataatccaatcatgcattagcatccctcaggcttgcaatacttctcacgagcagactaacttgacagcacctccggtgtactccacagcgaacagctcgagcacgaacaaggtgaatccgaaacccaagggtgcgaacggggtgaacctcgattctgagcagacgatcgcgagagatcagtcgatggtcgaatgctataacagggttcagggacaacatactctcggcggcgagcatgaggacagtcaggaccagagcggaggtgatgaacatctcgatgaacaggccctgtaagggagaatgtgtggatccttgtcagttgggttgtcctatggaccagatttgcatgggggaattctcacttgagctttgctggtaccgaaaccaagagcaacgcctacacttagttcgccgggcgtcagacccaaaaggatcgcgctgggatccatgcatcagatgttgtctcgtcagctacagctctatttaacagcagagagggtatctttgacggataacttacctggcgacaatggatccgacgagctgagcgatgcaaacgaggacgaatcgaacgggggtgatgactccgcacaggaggagggcaaacgagacgttagggttgaaaatctatccgggagacgactcagcgtcgattcagctcctgcgcaacgcatgctccattccaacgcaatgagactcacgctgcctgtaaatcggtaaaagatggcagccatcgcgaacaagctgaacccgaaggaggccgagatgtagaagagacccataagtcgggctgcatccgaaccctcgagctgagtaccatccgagcccgcgttgaggctcaagttggttactgtcgcttgaaccccaccaagagcaaagaggaggaagagtacagttcctacgagacgtaatacggaaatgagcaaaaggagttagtccgaggtcgataatagctaggcagaccgacttaccgacaaattcaccgctgagatatcgagagggacccgtgctgattagcaaaaccgagctggaaggaggtatcaggagcggaaacgtactacatcgcatgcaggtcgtttcggatgttgccgaacatgccgtcggggtgatgcttgaagaccatcttgacggttgagagatatcggtcgaggtgtaaatcgtttgcgatataccgaagagttgctgggtcgagggcttccgagagtattccctgctgtctcaagtctttatatgggagcgtcgaacaatcgatgcgatgtcaggtcagggtgacaggaccagcagtgacagcaagtgattccagcttcttgtgcaaatccggctcggatcgttgctgcgatgatgcgggttggctatggtatcatgtccttttcgtccgctgggtggatatcagcatttaacccatccatcaggttggtggatcgcatgtgagagtgggccgggcacaagaggggcagaagcacacgaagaaagaaaaaaacggatcaaagggaagctttcatcttgctaactcctgctcgaccggcccgtgagatcgagcgtgatcagcggaacacatggtgcgagagccagcaagggaagcaatgaagatcacgatgaccgccgtggctgatcagaaatcagaaacctttggattgcttccatcgatcacgcctgtctcgctgctgccaagctgcatcacgtgaatcagccagtgacgtagccagatgtctctctactctcgaccccgcgctacgggacttttgcgtcaaattacacgacggagcaccggacataaatgaatagatccactccgaccagttacatgcccgtgttgtggctttgatcgaatcatcgtcagtttcacagcctgacctaggctagagatcagaggatcagaaccggggttctctatgagtggaacggcagaagattacaacagcttcgtaaggtgtaagtggtctcttttcgaaagaggcagagccggcataccgactatggtcacacgctggattccagcgtggagcggagttcaggaaccctttaggccccggaatcgcgactttccgtcaatgttcgctcgcttatgagcgctacgtcaggatcagctgaaacgtcagccagatgtgcgctgatattctgggttcatgctatgtagagctgtagaccagcttgcagcccgtttctatcttccatacaatcttgtctgcgctatatagtttatcgttacgattccgcgtgttcgctcttccgaattgtgcaacgcatcatggcgaggttcctgatcgaagcgctcgtgaacaggaaacacatcgcatactctttgcctatagaatcggagggcgatttgtccaggatgcttccgccgcaggattgggttgcggagatcatcaatgtcgactgagcgcaggagaggtctttcagtactggttgaataagccctcaccggtgttgctcagcgatgagcgtgttcggctcgagattgttcgcaggatgcttggctgaatacttgtcgatcgagagacgtccatcgagcgccgcctcctcaggccgcttctgtccaagaacgagaactcagacattatgcagtctgcttgacagtaggattcgggactcgttcagcatgtctcatgcgcttgccgcacatgacatccagctctcccgcgatgtaatccatcgaacctctgttgatcgatttcgaaagtgttcaactgattctttctctgctggatgagatcgtcgaggttcaagacggctgtagaggttcgacaggcagcgagctatcaagtagggaaccgttagctgcgcgcaaaagataagagggcaggacttactccttatcaacctctggatcacccggacccggtacctccaagcgtttggagtacgcatctccgctttcactactcgtaatcccttaccttctttggtcttcccgcaccgctagctgcttggttgccatctggccgaagctccacgagcaatatgcacaagtcactgatgagcccatgtctcggcggacagcgatcccggcgctgcaaagcgattgtaccatctgcgaatgccaacagatcgaccaagcgctttgatcagggtatcagtcagctttatctccaaccgaaataagtctcgccgtttgcatagctgaatcgaggtctactcaatcgaaacacgtcgagggattgacgagatcactagcatacctgtttgcgcaacgtgaagtgacattgacgcaggaaactctgtttctgacaaagcggaagggatttatgccattcgacttcgtggtcatcgatgatagtcgtcgcgtcaagagtgatgctatgaaatgagggactactttgggttcatctccaattagcaacgtcagaagtgttctagtacgcagtgtcaaaccacgacgctctctccctgggctgggcaacgatgcccacgagagttacgcacatccagtcgccagaataccaaagggatctcgagacgagtctatccgatctcgagaagtaccttggagatcctttccattttattaccccagtactctagggagatcacacccaatgagagccttttcctgtatccgatccgataaagacaagatcacttcacttcatatcacgttgcgaaagacggtggaggcccggcctggacttcaacatttgcagccctggcatgggcacgggcttgacaggtgcgaaattatcaaatgggtgttttctccctcttttcagattgtgtgcggagatgctaggaggcggttgggaaagcgaggggtttcaaaggcgggattgctctaatcattcatatcgtcgttatcatcaacatatgccggcactgccgacgacgtctaccacctccacccgctcgtcccggcgttgatgatcaccctgtcctccctgacgactcctgcgctcctgatcctcttcaacatctcgttccgcttcttttccaacaactctgcccgggtcttgccctccttgaggacgacgtgaagtcgagcctgttggtgctccttgataccaaacctcgctcgacccttgatatctatccgtttgactgttcggcccttggagacccatgattcggctgtatcacagggggaaaccgagggggatcaagaggatatcagaggattatcagcctgtgaggtatcgatcccgggtccggtccgtcgacttaccgacgacgagcctcccctggttgagacccttgtccgccgcgtggttcctcgcgagcgccaaggtactcttgatccgttcgctcgctcgtttctcggagaacttcatctggaggatggcttccccgaccggcaggccagagatctggtgggcgagtttgttgagctttcgaggagagatcttgaacttggccgtcgagtatttatgctgcgcggggtgcgggtgtgattggtgatgtcaacgacaagaacccttggagacgtgacaacgccgcgtcgactcacctgatcgaagagcttttcctttctcacaccagtgtcccgcttgaacgtgtccaattgggaaaagatgtccccttcctcggcttccccgctcgacctcgtcaccacctgagcatcctgagcggcgggggttttgttcaaaggcgtggcttccgaattttccggtgtgcggtctcgttttcgttgcaggaaggagggaatgaacgagttgaaggggttgtagctagtccagcggggagaacatcagaagagggtcagccaaggtaaggacggattgatagccaggctgaacggtggatataccttcggacctgttgcacgcagatacgaggttgtcgggacgatgtggccgtctgtgtagaccgaagtgacgggatatcgagggctaagaggatgcaagccaggcgaggaagagtcgcgattagtcgggacgttgcgactcggctctcctgatgaccgcgtcctactcaccgactcgtcgtattgatgatcggaagctcatgatgatcgtggtgtgatgtgagaggatggcatgtaggctttgcgggtagattgtcggtacaaggtgttcgatttctgctctacatcaggttgcaggttgacatttaggagatcgggggtgactggagggggagaagataatgagcggacattgaaaatgataacaagatatcggctgaccgatgagagatgtccgtgtttaatgtacgttattattacgttgagtgattgtcggccatatccgttcaccgggccgagggggtcagactttgttgatcatatggcttgcctgaattgaatgactcgcaggcgttcatacatatgctacaactttgtcatattgtacaaatttcttgaatcgtgaggtgtatttcactcctacagtatttagcaactactgaatcattcgcggtcagctcgttgttgcctgtgctcagtacacacgaacgaatcatgtcgactttgacctcgaccttcgagtcatcgctggatcttgtcaagacctttctggtcgaccgaaatcgagccctacctgaacttcccactcgtcctacacgttcagccctagatgcggccctgcaagctcttccttcgtccttgccggaagaaggatgggggaccaagcagaccatagaacacctcttacaggacgtcgtgcccgggctatggacgggtcatgctggcaataggtatttcggcctcgtgactggaggagtaaccgagggggcccagctgggggatatgatcgctacatcctgtccgtgctccaagtcttcccttagactcgctaccataggctaatatctgtcgtttcttctcctcccacccacggagggttcttcagtggacgagagcctccagctcaatttccctgatagcactatcggattagccctggaagacaagacgtgtaatctcgtcctggacctcttgggaatcccccctcataccttcaaggggagaaccatcacgacgggggcgactgccagcaacatcgtcggcttaggttagcacgtcatccctgctcgtccacctgtatgacccgcgttctcatcccgagatcaccgcccagcctgtgctagagatagcctcctgctcgatcacccgaagctacccaaatgttggactgtagcggaagacggattccctcccctcaccctcgacgaacaaggtcgacccatccccgccatccgggtgttttgtaggaaacctcacgggtcgatcaacaaggccgcagcggtcctagggatcgggaggcggaacgtcgtcgatgtacctgctggtagggatgaaatggcgatcgggatggacgtccaggaattggaccgagagctagcgaaggctaccgaactcggtgtgggatgtgtggtcgttgtcacgctaggggaagtcaataccgtaagtacaggtcgttgaccctcgcgcagagacttgcagtagtgtatcgtaccgatcgacgcacccgaaaatctacatagggcttctttgcgcaagatgtgcatcgtatcgccgacatatgcagagatcacggtgcctggttgcatatcgacgccggtacgcctaattcggatagagacctgctaatgcaaaccgataagctgaccgatgatcatctgtcttgggccagctttcggagcgtttgggtcgctgttgccggggaacgaacatctcagcggtgaaatgatgcgcgcggatagtctgacggtggatggcaagtcgagatcctattcacactgccagagcgttcaaataacctgaccatggatttcgctcgcagcacacaagtggctgaacgtgagtaccgtcaagcacgatgcctaatgcttcgtaatgtgaacgctgagctcgatatgtgactagtgcccgtacgactgtgctctgctcttcactcgcacgcctctacacctcgtcagatctttcggtccttcacccaactctggcggcccggcatacctcgcaccttccagaatctcggaagacgagcacgcttcggacgatatccgagccttgcgagatcaccatcaatcgttaccgagtccgctcaattgcggaatagagaacagtagaaggaatcgagctttgccgctgttcacagctttgttagagaacggtcgaaatggctacacaggtgattcgcgaggtgtggctctgacattttcgattgctgctgctgatagtttgtctggtattacaacagatattgttcgaagaaactgcgatttcgcgaactgtatagctaaatggctgcgggatcctgaagccggaggacaatggtacgagctcgtcaacggaagccggtcttcatcagaaagagcggtacctctcaatattgtccttttccgaggcaaaaacaactcgagattctctcctaaagatccgacgtcggccggccggctggtcaaagcgatcaacgacaccaggcggatcttcgtcacgatcactagttgggaaggaataggtgctgtcagaatcgcggtttccaactggcggacggctaacggtgaaggcggagtcgaagcgagttcggaactcgtcgaagtcaagggggtcttgagcgaagtcatgcagtaattttgggactacccgcgatgtacccgatagacgtgaagccttaaagagattcaggcaatctcttgtatggaggaaattcatggtccggattccacggctgcgagaaattcttgctgccctctgggtacgctgtgcctgctgatgaagcaggccaccatttcggtacgaggccatggcgactcgcaacttcagatttgagcctatagttcttcgccggtgtattcccagcagatccgagcgccatgagcttgatgcccccttcgggttccgaggcctcctcatattcccccggctcagctatcagataagcgctttgctcgtactggtacgccttcatatcgagcccactcgaatggatctgctcctgtggatacctgtgcggatcgtacggccagcggacgtcacaattgcagagatcctcctgtatggacatgttggcgacatcgtagttgaccttgacgatagggatttgctcgatataggtcaggatctcccaaacgtcttcggtactgacgccctgtttctcgtcgacatcgtcctgcgagaccatgtgcgatactagccaggcggccttgtccgtcccaaccttgtcgtccaggatgagaaagtcctctgtcatgcctcgctcatcaaggtcccgccggatgtccgcatgaggcttcccgtgaaaccgaggctcgtcatggatgaagagatgataggtggccgagaatcgggcaaaggaaccgaattcgaattccgtgtgaaccgagtctagctgtgcaggagtcaggggacatgccaaaaatgcatgcacaattgggactttgcctcgcaggaggtgcatcgttgatggcttttcggatggggtcaaccagataggtttctgagggtgagttggcaacttttatcgatcaccgctatcaccgggcctggaaggatccagggatgtcagggttcggttccgctggcatcgtctacgatagtaatactctgttcgttgtctttgcatacgatgcgttccagaaacgcaatcatggtctggtgaaggggagtgatatgacgtggcgcgactaggcgcttgagctgcgccggatggaccatgcgacggtgcgttaggcaaacatgatcatgtggaattcgtcaacaccggtcgacagtcaccttccggagagcatgtcatcagctccaacaagaaatacaagggttccttgccaatccaaacttcgactcgactaatggctgcctcaacctttcgagtcgatgggctggctacggtgacgaatggaggattaagactcgagatcagcgtagaggacgaaagtctcagatgtatcttctttggtacccgatcttgtttcgtcaaaacgcatcgcgttggtctgcccggaaattcaccctgaaagtgctccagctgttcgcctccagccagatgcaactgagggttcccatgggtatgttcatgatgtgtcaaatacaacctcgattttgccatgcgaaatgcgcgatttaggacccatccggccggcccttttccaattcttcccgaatcttctcaatcagagctctcttttggtattgttctcgtgccagatttcgagtttgctgtagaataagccgtcagacctaagtattgagctgcgagcaagcgcatcacacactccttaccttcaagaacgtattcaaatcgattcgttctgcatcgagcgctcgagcgagatgataaatcgtgtcctctatcgcgttatcctcggccaccagatcaatcagtctgggggcgggtgtggcatcagcgtcgaggaacccagactataacgacggctaaccacaacttactgattatgcacgatactgacgctgcagaccacctcgtccacagcgacctcgcctcgcctttcgagatccctcactctctcttccccagcggtgacgaccgatccgatcttgtccgctactcccacgcagaccgcacggacggcctcgagccgagccatctcgtcccgtatggcaggttctccggatgacagatcagcctgtacgcctagcaattgcgaagtctgtccttgcaagtgttccaagagcggaggtaatcgagcagacaagtgagagtgcacgagcgagtgtagatggagcgtgcttggcggaagaggtcgcgcagggggtggtgctcccgacgcgttcgagctggtgggggcggtgatgtccggattgacatcgtcgtcagccaggaggtcggtgataggaggtttaggggccgctcgaggttgaggtgtcagactgggaccaggagtggagtttagcacaaaggcgcctggtccgctgtgttgaggagggagactagactgtcgcagcgagtggtaaggttggccctgcggcggtaatggcgatccgctcgggacaggcgcataattcgcttgttgctgaatggccggctgatatgatccctgttgttgtggggatggcggcgcctgataatttggccctggtggatactgcccagggtgaggggcaaatgaacctcccgtgttcgaacgtgcaggaggattccttgaaaagccgtcccgtccatcatgactctcatagctcgagacgggccttccagctatagtgggtggccctggtcgaggcggtggtgtcgaagaccctgctgagccgccgaagtcgtgtccagtaggaccctgacgaaggggagaagcaggaaggggaggtggcgcaggtcccgctttatatgccggcagttgctttaggaacatgaaagatcgttaggcgatattgaaacaacccgcattcgtaacatgatctctcacctcggacctccctgcattctgaacgggatcgccgtaaccgcccaagccgggcatgacgagctgtctcggtcgtgccggcacccctggaggacccccagctccattcgcgttcgaatccgtgtacgttccgttcggccggccttgccctggaggtgctgggcgaggtggtggttgcccaggactttcaggacgagcagcgaaggaagacgattgtgtaggcgtcgtcggcgttgttggcggtcttgcatagacaggtggctgagccgagaacaggtcctgcatccaacttaacattgctgctaaggattgagcctaaggaaaagcgacagtaaaggttagattgatgaggagagcgtgctggagctggcgggtcttgacacacctcccacttgcgttcccacatgtccaccatctctcctcccaccttcccgctcggctcgacctctttgcttttcctaattgacatgtccctggtcggagtcacgtaaaccaacggaggtcttctggggtattccaaggggaaccatacgacgatcgggatgtgatatgtttgagctcgatacgagatgggaatggtcccatgcaactgcacgagcaggtgggtttgacccgagtcgtaagctgtcaagtcgaggacacatacccgttagctttccatgaaaatgaccaggttacggattctcagctttactgtatgcgtccgttttgatagacagtgtgggatatttagatagagccgtcagagcttcccgagagatgatgtcggatgaagggtagggcgtcaacacccggtccagccattgcttgatgacctgttgctgttgagccgtggccatctcgggttgaatgcgggattgtaagtgctgaactacttgtctcatacaacccggttgctggattactctgtagatatgcttgcaagagcgacaaagtcgagctcgcatctatgaggatgggtcaaggaaggttgactgctcgcccgatcgaccgcgatgtcctcgccgcgtcactttcctcatcaagcgcgagtggacaacccgacccttcatttgaacagcggtctgcgatcgataccatcatcacatccgatctctacacccagctagggagaagttggaagacaggttcgagaaggagtcggctaagccgaatgagacaaggaagtttgaagctggtattgacaatttttcagtgtgtattctctctacttgtacaacagaccccccgatgcctggcgctcgggaggtcgagtaagaccggacagcccatacagcgtaaagacgatgagacgaccccaccgcgaagaaggaaaggaaccctgcgcctagtgaccgttggtcgatccgttcgccttggaccccttggcaccggcctccaacttcttttcgacctccatgaactggttcacccggtggtccttcaagagcttctcgcccttgtcctcggggaaaggcaggatgggcaatcgacaagatccaccgtacccgcgggtctgctggaggtagtacttggttcccgcgatcccggcagcgacgaacgcccagtcggcctcggaggccaatccttgaagacgggtcatctcggccagagatgccttaggagactcgttgagcagatcggccgaaccgtaatacaagttggcgagcgcgtgagggtagacgttgcccaagcccatgatggcaccgtgggccttgcctccgagaacagtggggagcatgaagtcggcgaacccacccagagtcaggaaactgtggagacgaggagcgatcgccggtcagattggacgagctatcaagccatggatatagccagctgttgacttacggagcctgagggttccttcgagggtagtctcgctggaactcttccgaagtggtcgcagccgtgatcctggtgagtttaccaacggcaccgcaactgatcatggggacgaacgtcagattgtcagtccagtcctccgtggccaagattcgttttggatgatccgactcacgtcagcttgactccgcaaatgttggacgagcccttggcaatgtcgataatcaagtccgaatccatgtcgattccacccgcagcgccggggactgtcatggagtgaacattgacggtgagccttccgcatcaaacgatgacacgagacagataaggaagactgacagttgtaaaccatgacggggatgggagatgcctcagcgacgtcgataaagtacttcttcaaagcgtccctgccgagagcaccagcgtagtatcctgaagggatgacaatggcaaagtcggcaccggcctcggcggcctccttgctcagctggatcgatcccttggtagatccgacaccgctatatttggcaagagcaaagtcagtcagtggcgtgacctgacagcccaaaagccggagcggggcgaaatgccgagagcctcgagactcacgttccggcgatgatggtcgcatcgttcagtccggcctcgtcgagaccttttcgggcagccttgatcaaggtcgttcgctcttcatttgtaaggtgatgagcctcgcccatggaaccgcagatgacggggttcatcttggcctgtgccagacgaacggtgtgggcgacgaaagtgggaacatctgtgaaacgtaaggcaggacatgaatggtgagctttgtcagggtgcacgaaagaacgtgacgccttaccaatctcctcgttggcatcgaaaaaggtggggataggagcccagactccgggaacgagaggtcgagtagtagcgacgggcatggcgaagggttgtgttatggaacgtgaagaggcggagagcgtgattgaagaaagaagaaaagctggcgattacagacgagaaacagatagaaagttgacagaatctcagcagggtttcgatcacggctttagctgtctggatagataggaggaatgtgtttatggttatatttcgatcaggtcaggcatggaggcatgtcattgcaccgggtcgggggtcccctacctgcgcccagttgcgctcgctcgttcgcccccggaccactcttcacggtccggtcagccggacggcccggtcgggggaaaagaaaagccagtattgggtgaatcctgattagcccgcggtgttgccccactctgttcgccctgggtggcagcttcggctgtgtggtgcaagcgagcacgcgggttccgcgccgtatttagcgcgaaacccccgagtatgccatcacgtgattgccatcgaaacgccggtggtgcgcgccctcgatctttccttttatatatgattcgcccgagtttcaacccgagcgattgaaggggacgtttcaagctggtacgtcgcttcagcgcgcgtgccctgtcgatatgagctgtcaggctctgctcttcgaggtcattctgcctgtaagaagatgtagcggcgtgtttattgattctgacccaaacatcgacatcaatcggtcgttcacactccctgcatctgaccgcccagccgaacgctctggtagtcaggccctcacgttctgaacagcctatccggccatctaccacactcgtttctaatactccaaagtccttgctcaggagcgcgatcatggcctccaagtttgagtccagttcaagcttgaccgtaaacaacttcgcgctcgttcctgcagcaggcacggaagccgttagacccgccgtcacatccttaccaccggatcctgtacctctagctcctctccttgaaaccgccccaaccgtttcaacgactgtcgcaaatggttcaagccctcaggcgaccggatcggccatcggcccatcggctgccgattcgtcggccattgccctgccgaatgcacagccgtcctcaatcaacgcgccttcagttacgtccacctctcccacaggaccttcgacgcaaatgtccgcgattgaatctactcctggttcttctaatcttagcaccgagtctacagcatcctctccaacctcgacctccacgtcctcgacttcttcggcatttgcaacaacccaaacttctaccgcggattccgctgcttcgtccgatcccccgcccgtttcctccaccccttcgacttcgcagaatacgtggtctccacccacttccagttcggccagttcgtctacgtggtccgagcctgctcactcaccagtacctccgccggagagcacttggactaacgctaatcctaacactaacaccgtaagtttcgcctcctctggtcacagataaagatcctcacaatccaccactggtacatcagtgggtagcagcagctgtcgcgatggcatcatctagcaccagtgcctctgtgcagagctccatctcgacctcagaagcaatcgcttccttcaccaattcaggtcagtgctcctgtagcaagcaagcgaatgaattttgtatcgctgaaatcgtcggtcttaacccatctaggagaggctcttactggcagcggtttggtcgcctccgtggttcccacatcttccagggcgtcaactaccggcctggtagttgcttccagcgataaacctagctcgcccgatgctgcgagagcgggagccgaaaacggcgaagacggggccacttccagtacaaagggtggagtgaaaggtggagcagtggcaggggtcgtgatcgctcttctggtcgtattcgctctaggctggctctggtggatgaaaaaagtaggtcccgaatggcaaatacgatatttcgagctttgccgacgacaccttcctccgcagaagagaaagtccgtcggtcaggatcaagaccctttctggtcccgtttcttcagtaagcattcggaagacgacggtcttacagaaaaaggatacgataggggggacgacgatgccctcgcttttggcgatatactgtcgcacagaagtcctaagaagaacaagtcaggtcagggtgatgatggagctagctcgttctacataccctccaagtcgaccaagatgccccagcctatcgaaagccagtacttcgggtcgggggattctccattggagccccctccaaagataacgtacaacgcaaacgtccgatcggaccagagcagttggctgggaccgccgccgggaatgaccgcgtcagctatccaaccgcacgcgcaacctaccggcaatggacagtcaggtctggcatatgctcccgtggcaatgcctacaatgcctagctaccccgctactcaaaacgattatcccttcacgggtggcagacaatctattgccccaggtggatatggtttggaagccaactacagtacaactaccaacgaggttctacgcgatgaaccccaagcgatgaacagcagagcccaatctggccgggaatcattgagttcgtattacagcagcagcgatgccgacactatgggcgacaagaaacgtagtctcattgattcgatctattcgacatggggcaatgcctcctctgtgggaggagggggacgctcggccgtgtcttccgcttacatgcctttcagcgatggcagggcatccagaatacctcagcgaaagtccacattgaagaaatcatcgaaaacacaaagtcgaggcccttccacgggtccttcactcgagcgtcagcccagccgcggaaaacaggtccagcctatcgagaatccgccagcccaatcagtattgcctcgcaggcccatggcagccatggcggccacaccgacagcggtcaagaacaatatcggattcggagccgaagacgcgccgccaatgccgctcggctggggtaatcatcgagcttgagaaacgtcttcccacccagacaatcggtttgtagatcttttcaaccttctcctattttcctcaattgtaatacctgtatacccttgagcgagcatccgcatcaacttgtcataagatgccaagtggctggggtgcgccacatgccgtaaagcggttcaaaacgaatatacgaattgaatcggctttcacacatctagatgccttgtgtgaacctgcacaatcctatcttgacatccgccgtcttactgcctatagttgacactcgagatacgagaagctcggctgcagaagcaggctggaccggacgaagaattcgtgggaccaagaaatatggccagcaatcaggatgaaggtcgccggcaggcaatgctggagaagcagcgcaaggatatgttggacgatgtagcccgccaaaaggaagctctgcaacaggtatgcacatgcaggcctacatttagcccgatgagtcaagcctgacaatcaagctctctccgaaccgatacaggagaccgagaggaggagccaaacgacagctgccaggttcacctcgcggacggaaggagtagacgagcagctaaaaaagtcgaccatcggtctggtcacgctcgaagacttccggaagacgcgaaacgagatcgaggaggctcagcggagagaagcagcacagaagcaagacgacgaggcgtctaagcaggcgttgaagaagaagaaaaagaaggaaaaggagaagcgaccggccctgagcttcaacatcgatgaggaagaagaggacgaggatgcggggtcgagcagtaggaagcgatcaaatggcgattcggaaggtgagtttggctaccgtcgagacattatgaaatcagacgtgtttctgatttcaattcaaaacagcgcccgccaagaaggcaaagctttcgaagaaccctactatcgacacctctttcctgccggaccgagatcgggaagctagagagcgcttggagcgtgaacagctgcggaaagaatggctggagaagcaggaaaaactcaagaacgaggtgatcgagatcacgtacagttactgggatggaacaggacatcgaaagactgtcgaggtgagtcaatgcgagatgcctctaacccgcttgtcccaactcactttgggatgcatgatcgcagtgcaaaaagggggacaatatcggtcaattcctggagaagtgccgagctcaattcccggaattgcgtggaacaagcgtagataacatgatgtacatcaaggaagatctcatcatccctcacgtgagcccggatctgaagacataagaagtcccgtgactgacgttccgtgtcgctttcttagcattacaccttttacgattttattgtcaacaaggctcgaggtaaatcaggacccttgttcagctttgacgtccacgacgatgtgcggatgctgcacgatgcgaccaaggagcgagacgaggtgggtcgacgtgcgcggttcaagcgagtccctgtcccgacgctgaccatcggttatatagtcgcacgccggaaaagttgtagagaggtcatggtatcagcggtcgaaacatatcttccctgcttcccgatgggaggtctatgatcctgacaaggattacggtgcttatgtgagttcgcgcggtatttgttcgtttgaccatcatgctaatgaaagcctccaaacagaaaatcggctagacacgagccttattacagtgcacactgtttcgccgagagatcatgtgaaccatacccagaaggtgttctctctgtcaattaggtatcgttatgaagttattcattcgctatagcagggctcgatacgtttgggccagcgcatggcacgagccgcccctcatctaccgccgtgttttgctatagccttcaacgtcggggatcaatttcccggtgcggccagagcgttcctacaggccggtatcttgtttcacacggcgtgggccggagaacacggccagaagatgccgagccctccgactctttagcagtagtgcgcacgaaatcgtggtcattgccgatcgccacagaattaatcaccgctttttgcgagacgacctttgtccctcccaccctcaataatggcttatgactgacctcaacatatccaggtagacagtggtggcagagcaactattgtcgggattgtacctgtgttcaggacccgcaaggcaaggatatgaaaactgacagaagtgtgcgaatttctacttgatctttggatgtcgtatcactggttgtagacaacatcatacgggatgcgcagcacctgaactcatcccatgccgcattgtagagaagaaccatatactgggacaaccacgtgatggcccagtccgctgcgaaaggacatggcgctccgtcccccctgttcgtgacagccgccaggtttcagcctttctctcgatttagacaatcagtcgttagtcgccttgttcaacccgattacccctgggatcggccacattatcctctgcgcaccggtaaaaacaagccagctgccgacatccactgccccttgtggcttctgggatccattcgtcgagccgaattcaatttcgaagctgccaagctagatcccctcgccaccccggaacacctcgaagggcgaggtattccaagccgtatggataccttccaaaggcaattcatgcattcttttccagatgttgttcgtgttcaagatattgcacttgtgaatcacaccaacaggatgcatgatccagggtggatgcgaggctccccgttgctgattcaatgcttgtgatgtcgccgatacacggtagtatacaagaggtcgatccctctagggatcgaaggtccaataatgctgtgccgccccgcttctatacgtcgtcttcccatttgtctgccttcttctcctctacttgatcttcgacagcagagcgttgatctagccggaacaccccgacaagtttcagcctatgacgatacgaccgttgcggcagctccttccgactcacctcgctcttccttcccttgctgttcttaggtcgggtttccatacacttgtgcaggtttttagccgcagcggagcattccgccttgtgttgaagatcaccagaggtcgcaaagcatgctagcagcgaggtgagctcgggtgtgcaaggcacaacgatttgctctgtgaaagatgtcaaacagctatgttcagccacgttcgggatcatacagatgtaacaccgccaacgtacctcgcctaggtctgaccctgaacttgggcggcatactgatcctgagtgatggattgctcggctgtggtaagcttgcccaacaactagatggattgtcagaatacggtcgagtgatcttggatctttagatcttgtcgagtgaaggggtcgctggaatcgatcacgtgatttgcgaggggcaagcttggggtccggaacagcatagcagtagtagtactcatgatgtgtgatgcaagcatctttcttgattaagctatgcatatacagggactctgccactactcgctgaacttctcaggcaaaacacaggtcggaactatgtccacatcatgggagaacgctcgcaaacatgcccgagcattggaggcacggctggagaccaagctcacctcgtactccaagctcgctgctcagatcagctcgggctcgccgagaccgagttcagataagctgagtgagcaggaggaaggaatcggaggctacaagttgatggaagaagaaatagaggaacttctggagaaggtcggtctctattctggattcagttaggtcaagccgagctgatccaagtcaagactggcactagcttggagaagctatagacaacctgacagccctgctgaactcccccgatatcccaccctcaacctcgatgatgcatgcagcatctcgccatagggatgtattggatgattaccgacgagatttcattcgaacacgggtcagtcgagaatgtgactcacacctttatctgcaatcgctaatcttccttatcatcacacatagcaaaatgtcgaggctgcgatggcgagaaccaaccttctagggagtatccggaaagacatcaagtacgtacacgctcagattcaataatctcgtgacttctagcttggctgactggaagaactctcttagtgcatacaaatcatcattgcctcagcacgatcaaggtcggacggatgcactgctgaacgagagaggacgtatcgattcgtccaaccggatgacggatgagatcctggagtgagtgaatcgctctttattgtcgggattacagcgcgtaattaactcctatccacctcatgctgtctttgaacccgggtttcttccccagacaagcttatgcgacccgggacgatttcgctcaacagaggacggccatcactaatatcaactcccgagtgggcgggatcatcagtgagtcacaactccttcaaatcagactgatctgcgtgctgaacgaggtctctacctgcctgacaggtacattccccggtatcaattcacttctcggtatgatcaactcacgtcggaggcgagacaccgctattctcgggacagttgtcggtatctgcacgatcatcctgttatggtggattggcttgctgtagattgcagaatgggtgactgactgagacccagcgaggggattttaaggagtgtttggcttcgtggcgttgtaccttgataccttgacaatccaagcaaggatctctcgcatggctgtgttgtatcaagctgatcgatcgaaagacacgatcgaaccactatatcacgttcggctatcatactgtccttccgccgattggtggcgacatcgcgtgtcttgcctggtcgaggttatggtctaggctttggcgctgcccgggaatccagttgttcgatattgaatatgatacaaataatcccgatacacagcgaaaacagaatcgactacaaatcctcctcgggtccatcgttgataagcgcagcatagtcttctgcgctggcaagagtggggaactttctcttcttcttgcgctccttcttctcctcgttgccccgttttcgcttgttcccagtgtcaagctcctcgtcctcggattcggaagctgagaaggccgacgtaagagggatatttggcatgtcatccaggtcaagaaggtcgtccgagtcttcgtcgatcgggaagtcggcatcgtcatccgagtcatcttcggaatctgagaagacgaggcggaaaccagtgagcatttgaggcttgaccgagatctttagtagtaaaacccgcttaccttcagcaccgctcgcgccgtcttgtgagtcggcttccatgtcaaggtcatctccgtcttgtccttctgcatcctcgttctcctcatcgtcgtcgtcgctgtactcaatatcatcgtcgtcactatcttccatgaggtgcatgtcgtcctgggtctgaggcatcgaggcttgcatggcctgcatatcggcatcgatgtatcagcgaatcgtcgctgatgtgcaaaatgctccatctcagtcttaccttccacacctcggcttcctcgacgtctgactcgtcactctcatccccggtcggttcacccttcaccgagcctccaaattccgactctcctttcttgttccgcttcgtcttggccgactccatctgtctctggcggtcgtgttttatcgtgaagaatttgtggaagaagagctggaaagttcaagacgatactcgttagcgagagcgagacccacagttgcccgaactacttacctggtctgccggcacatcctccaccttcttgttccagaatttctcgtcattcacgtatccgtccgcctgggcgactctgcttcctttccccttgatgacgctggtcgcgccggagcgacctacagcagcgggctgcatgatactcgctcctcgagcagctacagtcttcttgggattccggtaggcgaatcggtccaagaatgctaccagggtgttctgttcgatgtcggctgatcccgagaggggcaatctgagatcgagaagctggttcgcctgaagcgagactgaaggatgaaaatgccgcgtgaagggcatctatcgatgagagcgggcgcaagttcagcagactagcgtgaaggcacaagatggaggttccggcttaccagctcccacaagcagctcgacttggcatttgcaaagagcggatctcgcttccttccgtcgtattcgttgagaggcttgtcgtcgatagcgacagtcgtcttctgaactttctcttcaccatcctcgggcgcatcctcaaagtgctcaacaccactgtcctctgcttcgttcaggagggtagcaagacctgaggttgtgctgaagagctgttttgggaatgatgtcagggaattagcatctgtgagtctagcgcagaacacaatgactcacttctcccagcagatacagagccccgcagatgaagggtggctggtgacccatcatgacctgcagcaacctcttgacgaacgccattacccggccgatattggtgtccgctcggagagccttgaagaggaggttgaggtacatgggctgcttgtttgaatcggtcaacctagggtctagcaacgactcgtaaagcgtccggtagaagcggtcggaggtggcctgtttacgtgttcgtgatcagctacgttagagacgtgatgaatgaacggggaggctgacctctttttgtgaagagatctggtaaatcagggtcagggctcgaatcgaaatgttgaaggttcccgtgtgagtgatcttgaacagcatctcggcgtgtttctcgaatctgtaagggagatcaaatcgcgcacgtcagttctgctttgtctaccgaatctgaatggtgagaccactaacacctcgtcctctagtcgagcgtaaggcaaagctcgggtcacaccggtcaagaccgctgcgaccagcttggcatctcccatctcgacttctccttcctttttcttttcgtcccgcttcttcccattcctcgttcccttctttcgaccctgccaattgtgaactttgcccgccaccttttgtgtcacgtcagcgccctcctccttggtctcggcatcgagggtgctgttgcttccaagcagttcgcggaagacctcgaagtagacctcgacgaggcgggctgcaacgtctcgctcctttccgctcagcgtcatctggttgagcgtgatgatcccgtagtatctggcgtgttccgcagccgctttgtgcggatcggcagtcttcttgttgtccttcttgtcaaacttggtatgtttcgaagcggacattgagggaggcgcgggaggcctaaggaccaaagctgcgacttcccggatgaccacagccttcatggcggggtgtgactgcaggagagtcaagatcaagtgcgaagccttggacgcgaccgatttgtccgtgtcaccctgtgaaacgtacaacagataagtcgagaccttggcgaaacgcacagcttcatagcatgcttacgagcttgttaacccccaatctcaacaagttttgttcctgctcggcattacccgccagcagcttgaacacgatcgccagcgcttgcagtttgacgaacgccaccgtatcgtgcatgtaaacctggcagccaaggtaatgtttaaaaatcagatcttgttccgaggcagctgggggacgataacctcacctctaggatttgcaagatcgagaagaaccatttcttcaaccagtcctcgaaagcgaagagaagcaggtgacggtcggtcaacgccgggtgaggcaagagcggctgatccgcgaggtacctggcagagtcgcgcaggggaagcgattcagcaatgtctttcatctcaaagtgtgaagcttgtctatgcactgacctaagctttccaccttccttgccgccgcccgagacccaccaatctcccaatgctcgcatcacgctcatcctctcctctctaccaccaccgcccttgatgccgccctccccggaagcaccggccatgaccctcaaccgttcgagctcgtcgatcctatgcagagggctctccctgaccaacaagatcaaggccgacagcttgtcctggtgcgtaccatcgctcaagatttgcttcaagaaagcggcatccgaggacgtcttcccgagggcgacctcctttttcttttgattgttcttcgaccgacctgattcggcggggaagctaccttcccggaattgagtgagaagtgcgttggctcgcgatgagagggcggcgagtcggaattgcgccagaggttcgagagggaccgcgggttcgggcagttccggtacggggatatgggtccagagaggggtgaaggggatgttctgcgacaattgttagatatgtatcagccaaacaagtacgagctgacctgaatcccaagaggaactcacctgaatacccgcgttctcagtgttcgccaatccggactttttgacgaatccagcgatctcttcgggtgctttgaggggctcctccttgaccatcttgggcttgacctcggggacaggcttttcctcctcgctctcgtcctcgtcctcctcctcactgctctcctcctcctcctcttctgcttcctcctcctcgctggcgacttccgcttcgctctcgctggagacctcttcctcttcgctcgtctctacgtcttcgtcttcgtcttcctcttcatcttcttcctcatcatccacggtatgatcaccgggtgacacagcggcaaagtccaaactcttcatgaaagcagagagctcgttcttgagcgatttctacaaggggttccggagaacgatgggatcgacgtataacaaatgagcacgcagcgaaatccccggggacatattttacggaggcttacctctacagatgagagcgtggatgtcttgcccttgatcgcttttgagggcctgtcaacctcggcttcttcctcgctatcgctcaaatccttgagcatctcccaatcctcgtcatcccctccgagagccttgatctctcttcgcaggagatcatcgtcctcgttcgactggacaggtacaaccggtttgctctttgacggcttttttaccggtgtggatttagcaggggtggtcacgggaggtgcgactgcctttgttggagttggtggaggaggaagttcttcggtcgcaggtttgagctgaccagtggcggccaggtacgcctgggatggtttcctagggtccttggattttcttgccatgttatagagagtgggagatgggagaacaagctctcgatgacgaccagcaatgttcaatgctaagtcgagtcaagatgcgaatggatatggctggcgatcactcgatatacagagagggtagttcgagtctgtcaggttgcggttgtgcaggaggcctaggcgtgattcgaacaataatttgtgaatttggatccgtccgacacaatgccggcatccctgcccctgcccctagcttgcccttccctagcatctctccttatttccaccagcaattccgagcatccatccatcgcaacgtcaggggtcaaccaagtaggacccgacccatgttttgttcaaacctcttggtaggcaaagcccctccagacttgagagtcgatatcagcgtcgaatatagacctcgaattgccagacaacaggtcactgagccgctcgatcgatcttcaaagcatcttgtgcaggtgcgcgcgagcataccatcaacacgtcaggagcaatcgtctacaagaccctcgcttctctccccttcataaaggacaattaccatggccgggccgacacctgccggcattgtaacgatagctaaaatgctactcgccagcgtagtcgtatgcctaatcctcacggcgcaaggaagcagagcgacggctctgacgacatacctccagggcaatgaaaagagctgtttctatgccgatgttgacggtacgtgaaatgcctcctcggtatcaacaatcggcctcgaaagaaaagactgacgttgtatctcggaaatcattaggcgttggcgagaaagtcggtcagtctatgcgatgcgctgcacggcgacctgatccgatgcgatgcgattcgagtcggcgaccaacaccgaggctgatccgtccccatcataccgcttgacagggttctatttttcagtccaatcaggaggatcctttgatatcgattacacggtgcaaaacccggacgaaaaggtcattttggaagggagaggagaacgacaaggagattacatctttaccgcgaataccgtgagcagaccctttgatcgagatggcggtatacgaggggactcgctgatcactgactgcggcgggtcgttattggcttctacaattcaggtcggggagtattcgttctgcttcgaaaacgagtctagtatgactgcgaaactgatcgactttgagtaagtactagggctgcgagcttgtcgagccgcgccatgctcgacgctcatcccgaacgactcgctcggttagcatcatggtcgagtcggaaccccgccggtcattaccggtacaacaaggctccatcgcggaacacacttcgagcttggaggagagcatatacaagctgaacgggatgttgagcaacctcgtccgaacccagaaatagtgagccgctaccttccccgtcgcccctcttgtcggaccacgttggggtacgatgttgacgggccgcacctccccacctagcttccacacgcgtcatcaccgaaatcactcgacggtgctttcgacggaatcgaggatcttttggtactccatcctggaatccctcgccatcgccgggatcgcgtttgctcaagtctgggtcttgaagagctactttggaaggactggccggtgagatctatttccctcgatagagtcgtccattccggcgaccctgaagtaggcgtatccgaggctgatcaatgttgtcatttgtacagtcgagcgaaagtgtagaccgcattgcatgaaaagtgtttgcactcgcatgtgcagctgtaaatcaatgatcaatgaaatgatcgtacccatccattactgtgcaacatcgactcatctctaccggcgtgactgccagatcgccctgggttccactttgatccgtttccatagctcgatctgaatcccaggtcgcgttttgctgactaagcagctcagtcctgccaaaccaaaccgcccactagtactagccctccaccggccatcggtcgtctccgctagagcatacctctcgagctttcgacgaagtcatcatctgagttctgaaccagcccttttttctgtcaatcacctctgtccgtgtgcttcaactcccacgataccttcttccctcatcccggttcaatcttgtattctatcacgctccttacgatctcacactctttaacgctacaatctggacctgtccctgcaacaagcgatcgcagtaacaccgtttcctgggctgccggaatcgccaacgaaccccatcatctcccctcgaaaaacctactacccaaatcacgaatcatattgaccaactgaaaaccgctctctggctatccgatgtgagtctgaggtgccacatgggggtgaagcactacagcgatgcgggaaagcggaactgaccgatgccttttgcactccaggcaaatcgatcatgtctgccactccaactcagtcggcccatacggctctagagcgtttctctaggaggaaatttgatctcgtcatccagctagactcccctagtctggatcggcaacatgtctcgctcctcgaagaccctgacgccgaaatcccgcccttcctcatgcctgaaaagttcaagacgcaccctcatcttgatcctaccgcctcgactggcatgtctgaaccttacgccacgggtgcgggcgggagtaacgggagtacttcgcgtacgaacacgacttctactatcatcgtcagctcgatcgttgccggcttcatcctgattctgggagcgctcttctgggcgattaggatatggaggcttcgtcgagtcacaccggaacaggacgaagaacgtcatggcgggcaacgaaggggggatgccgcgtttcaggaaaagttcaaaaagcgttggaaaaaggctatccgacgacgcagggattctacctggttcgactgccctgccattctggatacatctcactcgatcggaggagagtcgtattcggtgatgggatctagctcgtacgccaataccaagtttctcatacatgacccggaaaagaacacgagctcggtagctccaaccttgtatcatggatcaccggagagacggcgtccggattcggacctctcgtcgatcccctcgttcgaaaaaggctctgttccgcctctcgaagtcggtagtctacacaagccaatgatcaagagattcccacctcgatgcgcctccccgacatcaatgtattctcagccctcactacccgccggtctcgctcttcccaacacacctcgcatcttgggtgatccaccccgcgaaacactacccaccgccttacctcaggccggcctcacgatcacataccgacaccaatctcgagatttggacctcgccaagactcctcacgcctggcccgtcaccgaaaatgtcaacgacaatagcaacgatactcatgactctcaagaatgcctcatcacgacgacctcacatgcgaaagctaatccgctttcgcctaacacttctcctttctactcatccaccagtgtaacagagaccatcatacaagacgccatctatcatcagagttcacctcaacgcaagcccagaactccgcctcgctcatcgcgagacggttcccaactatcttcgtgctttgaatacgacccgaaagcttctactaggacccctcgatccggtccccgcgacgaaagccgtctcggaacgtccacctctgcacgctctctggtcagcttcgcaggtccctcatcgtccgaacgagtcctgctccctgccctgcagcacgttcctctagcgcaacgtgcgaaccaaacggtcacaccgccggctcggaagcccgtcaagtcgatactcaaaagtgacacacgggaccggaaatacagcaggaactcgttcgtccagtcggaatcgaactcccacgtaggtggatggagccatcattccggatctttcacattgcagagtacgtggtcccgttccgatctccgagtcgaaccgctggactggcaaactcgattgaatacgacggagctggggcaaactgaaactacgcccaaatcttttggccatggcgtcgctctacctagcgagccgcttcgagttctgcacggtgagggatcaatcgaaccgcggatcaaagcgacacggtcttcctctgttgatgtcaaacataacgacatcggcgctcgtaaagtgtcatcccgcactccgacaaagatcactcagagttcaacccttcatctgccaatcagcaaaatgccatcaaatgcaatgaactatctcgaatcggaagacttgtcctcgggcagcagggaacgcaaagatctcacgcctctgctaacggccttaggcatcgatgggcacgtcgcccagtcctgacgatgatcctttagcttagagcgagggccctttcgtctgaaagttctttcacagcgtaatccgacaccaaatcgtacgttcaagcatgacgtgcggggggcgcgcacagcccataccttgacctgtgttggcgaaacctagtgtcccgtagtgaacaccattgatctgatcgcaactgagctgaatgatgtagccgcaacgaagatgaacccccggctcaaccgttccataagctcacaagcataatacgatgtgatcccatgacgattatcccttgtctaatatgcgtgccttcgtttgaaccgactcctgtacgcgtaacgcgtgagaaaccgcttttctagcggaaacttggctttgccattcctgccccagctcagcggtaaacattcttgggactaggtcaaattctcttgtcgacatgtctagaaacacgctgcgccttgagcatatagtctcaatcgcatatacactcgtctgattcaacgagcttctgactgattcatacaagtaaaccaaaatggctgaggtcagtcgtattgcgctcgagaagaggcaagctcaatgcttgtcaatacagcgctgacacccgattttgcctgtttcttttcgtcatgtactcgtcacctgtggcacaccttcatatcttgatgcgtgttccacctcacagcaaaacgttcctaccttcaagttggttctctgtggtgacggtggtaccggaaaggtaagtcgcggttatcatcaccttgatgttctcctatagatcgatcctgatacagctacgacattgctcgatcagaccaccttcgtcaagcgacacttgactggagagttcgagaagaagtacatcggtaagctgacacttgtcttgagctagcggttctcaatcgatcgagctaacgcgatcgcgtttcggcatcatcagccactctcggtgtcgaggtccaccccctcaacttccacaccaactacggtaccatcatcttcaactgttgggacaccgctggtcaggagaagttcggaggtttgagggacggatactacattcagggtgggttgtcaaggcgattctcgttcgttcgacgccaagctgacgtgaaggatgatgcatcctattttgcgagtcacaggtcaatgtggtatcatcatgttcgatgttacttcccgaatcacctacaagaacgttcccaactggcaccgagacttggagcgtgtctgtgagaacatccccatcgtactttgcggtaacaaggtcgacgtcaaggtcagtaaagtcttgacctggctccacattccacatgtttaatcagctaacgatacactttcgggcgcacaaacaggagcgaaaggtcaagacctcgggtgtcaccttccaccgcaagaagaacttgcagtactacgagatctcggccaagtcgaactacaacttcgagaagcctttcttgtggttggccaggaagttggttgggtaagtcggccttgtcttccgttcagaacgaaagttcggttctgacatcactatttcgctttccagtaacccccaactcgacttcgtcgctgcccctgccctccgacccgccgaagtcgagatcgatgccgctcagcaggccatctacgaaaaggagttggaggctgccgccgccgcacctctgcccgatgaggtcagtatcagcgcgtaacactcgcccaattcgaacggccgctgattcttgcctggttgtgcgattcaggatgacgacttctagacgactctgcaattcgagtttctagatacctcacgaccaataaaacccacttccttcggcatacaaccatgtcatctcttatatcgttttgtgttttctcatgaagaacagtcccgcctgtcacgctgtagacgatttgaaacgattccgttcctttttactggtgtagcgttgctgtcaagctgacctcgccagcttcgctcttgtcacgtggcaccctccgctctggttttcatgtgcactccccttttgggtcatctatctgctgctgaaagagagcaaggatagtttgaacggatctgatacagtggcatggacagcaagtattatacactacaaggctggagaacgagagtgtgtgtgtggaagcatctgcctagaggcgcatggtccaggttgacgcttgcgggtcgcaatccttgatgtcggatattgctttcctgagtgggatgtgcgggttaatcaactccgcattttgccccccccctcggtttgtttgtgaggctgcgtcaaatcatgacagggctagcgaagcccttagtggcccggcgagctgttccgtaggccggtgtgccgttgcgggatgcagctccactgtgagaacacacgcaggggttcgtggtgaagtctgagcaggtcgagatggcgatcgatttgcgcttcgaagattttgtggagacccgctctattcacatgacctctacctccaacgtgtgtccgcattcgacgcaagtccgctggacgaccgccggatcatcggtagggatgtcttcgtattcatgctgatgctcggcatcctgcctgacctgatacgcattgtgcttcgtcttcctccgcaggctacaagttgagcggtgttaatcacgaaatcttggcgggactcgtcccctcaacttcgtctgcaaactcacgctttcaagccgtcctcgaatttcttgacttttctctcccgcttgatatcctcccgtttctcccattccgtatccaagccttcgggtccaccccatttcttccaagcgacctcttccacttggatacgcaaatacagcatcatattgctatagtttgaggcgtgcggattgggtttcagaagatgaggaagaagggaaggatcgcgcagctcggactcggtgagcagataatcctgaaacgaatggaatcgtcagcaatcaagacagcgatgtggcattgttcgctcaacgagtcgtcctcacctcgcgacattccgtcttggtcaacaacgagtactgttccggatgatccttcttgtcctttttacatattcgaactccaaatacctagaagaagcagggaaagagtgcatcagtgtcagaaggctcgcaatctctcgcctcaaaccaggcagactgactcgtagaaactcgtgatctagttcaaggctgccacaaatagcacatctcggcgaggtctcggggttgatagctgagcgaaagatcgacacgatacagatcacatcgaaacgagattagcctgggcgagcagcgcaagccgagttggaggcaagactgacgaggttcctctcccgctgcgatccgcgctctttccctcgccttttccctctgaatcgctatcatggtttgccttgcatccccatcttcctctgtcaagaagcctcctttggaattatggagtttgctgagatcgtattcaaagtatttgcctagcctagaatctctaggaagaggcgctggggtatctttcaggtctttggcagcggcttggacacctgaagcggcgtttctgctcgacgaaggctgattcggagtggtgttaacgaagctggtcgccttcctcgtggctttgatcgcctgggcatcttgcttcaatttgttcttggctgttacacagagtattgttattgatgagtcttgacgaacgctggaacgccgtgtggtaacgtaccttttagccgagcgagatgggcctgtcgttgctgtgctggagtcaagtcggcagacataccagctgatgtagggattgctaggcggctgaccagcggatagttcaggatagactaagcttgatgctgaaatggcgatatcttaaccgatgatgtccgaagctgagaagcagttgaagaggcggcggggtgtcgagcgaggagatcacaaagcgaccgagtttgtttacgtaagcgatcgcttggtgacaacccagagacaaagcccccggaaggacgtttgatggcaatagttgacatggtattgcctcctttgcgagatcaaacctctaattactctaacctctactgaccacggcctccgggaaacggaaacaccgtcgtccttgcggttttatactgcgagagagaccgtcaggacaaatcaatgtccgcagcttaccataccctcgttagcctcaactagactaggaaccttcactcagactgcccttaagcgacggtgtttccagtccatacagtataaaagtctccaagcctactgtcactcagtaagccgcctcttatatttcagtcaaacgaggcatgtttttttgaaatgtgtactgaaaagtgacgtctattttgcatgtaaaggagggccgtccgaagataagcgaatccgatcagcccatgtccggtactaaagaagcatttctacacaacgatccgttgatcgcattgttgaacattctgaaggattcgccggaagatccagggttatcagacatgtccacttccatcctgcgaagcctcgatacactggcgactcgcttggcggtcaccggttcagacgctgtcccgttgagcgccttgcccgaagcagtattggcagctcattacctcacgaatatctcccgtctctgtcactacgatgcagtcaagtatcaacccgtagtgtggatcgagaagatatggaactccttgaacctcaaaactagggattttggatggatgattgaggtgtgctacgggcctatctctcgcgctggatcactcagtgacattttcgaaagagcgttctatcaagcgacaatgaaccactttgtcgtttcacatcaaccgcaattcatcgggaaagatttcaaaagacctttccttgggccgggagctgccgatctggacgctcatgtgcttggtctcacggctgaaaattccgacaagaaaaaccttgactacgcctggatcattcctatcctcgggtactggaaagaccagaactgtcatccagcttagttacatccggtcaggtttgctggtctgcgtcaggcgttcttatcgccaaacaacctcgattccgcctcgcgacgacgacgttgccgacattctactggctcacgctaacagggtcttcggaaaaacctgtatcgtcgccacatggctgatcgcgctggcgagggaacttttactattctatcagaaagactatgcaaatttctgcaacgggatcggtgggtttgctaacgcaactgtgtggagtcgatggaagcaagaagaagcagaattgctcaagccgtggtccgcagggacctcccatatctcctcgcctcctcggccattcgcaacagctgattcgttaacgccgagggaacagcccctccaggatgtggctcggacagccagaggactcagtactgctgacaggtattcatatgcgacacattgcagcgcttgtcgcgatttgaatatatatccggacgaggctaccagcccagccgcattcttcaaagaagacctctccgatgcgtttcaaaagcttaccaccttcgtcggaggattgccagaatacttccatcttgccattgactcatgtggtatcatgcaagatcgcttgcaaatcttgcggcagctatggtctcacaccgctggcgtcgtcttattcctactggacaatgacgccaaaatcgctcgtttctacgatcgacatgagctggaccatccggctaagccaggaagtggaggcaaacgttttatggagcctgtcttcgggctcccgcagaatctcgcgctggaccgagacgtgacgagatatgtggtgatccttcgaggtgacggaaattctgtgacgcatcacgaacttctgacatggcttccaaagatgggtcgtcccctgctaaacgataccccttatcaggcaatacatgaggacactatcaccacgcttcagatcaagcttcttaagcgcaggcttaactgcgagggcagcaatgaatagaacaagccatggggctattgccaggaaacgatggctttgcttgcacaacgtatatccctcactttgataggtttgcgaagtgcgtgttacattgcggatgctgcgataccgatcgaggatccagactgatacccgaattttatcgataggcaaatgggatcgcgataattctccggattttgccatggccctcgtcgaaaatcacttgcgttgtctatctaccgtgatgccaggggccgcgcaagtcgagacaagtagtccatctgagccactgccaaggtaaggtcagagtaacggaacccgctcaaatcgatctatacattattgacagtccttcttaacggccgaaagtagtctggccgcggctagcttcttccgacaggaacctagggtggcctgggacgctgctttgagacatctccgagcgtccaggatagaaaacgggtttgttttgcggcgcgaatgggggggaaatcgcgcgaatatgcctcatcagcgcggctgatcttgctcattaacgtagttacaaagggagagcgaaggcgcactcacctgtcgatctattgaaatggctgaagaaaatgtttttcgtaaccacacaagagaaagaagcggccgagccaatgctaaaagaagccgaagcgtactggatcaatttttctcactacgtgcaattgggaatccagtttttggaagacacaaaaatggccatcccgggcgtcgtggaggcttatacgcgtcatgcggcaatgatagggattattgggcagagtgactgggacatgatcatcccgatctacaggagcaaggatggccgacctggtcagactgatatttttgacccggacaacatctcatacatcccgattcgcgtgaacaaccacattggtggagacaaagtcagacgcaacagagaatttcgcagcatccagcctttgtttaccatccgcaaaacatccctccatgatcaccatttggttcgatctacaaggcaaatcctctccgtgtcagatacatacgcgcccgccatcgacccgaccggagagctctcgatcgggcgaaccagccaagcagctttttcacttgatagcctgcggccatcccggagctactctcaagatcttctctcgattacaagatgctcataagacggtgtctgaattactgggagtgacggaaattgcgagcctcaatacctcgatgagatccagattggaagtcaatggcctcacgtgcttgcgctcgcaggagtgaaccaacgctgaattcagctgtctgatgcaaaaacgagaaggctggaatctgcctcccattccaccccgacggcacaccctagcagcctgtatacgcacttcaccattcctttatgcagtaacgaatggttgtagtattgaatttgtacaacatgtacttagtcccttgatgtattccttcagatagacgcggcttcgacctatagcaatgtcatctagtctctgtcggaatatcgatcactgtcaagcagagtggcccatcgcattagcggccgcgatcgcgagagtcctgtcgctcgagactcactgtggcccatacgctcaatcttcgttcgaaggtatcgttctagctctggccctcttgcagcacctccaccgatcatcgtagcaccaccccgtctgtccttccaatcctcgtatacctcctcgtcgtcgtcttcatcgtcactgctaccctcgccggtcccatagctgtcctcatccatgctcggcattcgttcttgcgatagggacaagacatcgcccatgatggcattcctgaccttgctcccgcgggaccccttgatccgatcgcgcctgccgagtttcttacgacgggtcgtcttccatccccggggaaccatgccgacccgctcgctaacatgaataccttccttggcgagtccctgcattttctccggattgttcgtcaagagtctgatcttgttgtgttcgtcaccgcctagacccaggtctcgcaggatctcggcggcaatgtcgtatttccgctcgtcagcgccatggccaagcaagaggtttgccgagacggtatcatgaccgaggtcttgcaaattgtacgcccgaatcttttctagcaagccgatacctcgcccttcttgacggaggtagacgatgacaccccgaccgggaagaaagagtcgatggcggtgttgttgacctcgaacttcatcatctccactcgatggcgaagaaggacgggtcgagacggccgtggtgccgggcgcattggtgacggcttcctcgccgacggcatcgctgaccacgtcgagatccatttccatctcgcctgccatttcgtcgtcttcctgcgcatcgtcccttcgatccatgtcgacattgacgctggccagcgcgtcactcaattcgcggacgaccccaccgaccgacttgtcattcgaatcggaagatgcgccagctccgccccatgcggctttgcggaggtggatgatctgatcttcgcagatctgcctcaacgcctcgtccaactgctccccacaatcgcaccgcatgctaccgatcgtctctcccgtgtaacactcggaatgaatcctgaccaacgggtcaacgtccatctgtctcgccccttccgcttctgctcccaacttgctgttggtcgccatgaacgaccgttcaccttcgctaggttcgctcgtcttgccaccctgggtcgtcaatcgtccgacataggcacccctgacgagccgctccatctcggtctcgtcctttctccagacggcgtcgagagtcttgctcctgatcggtctcctcgcgccgatcatggcgtgcccctcggcgcggatgggatcgagctggacaggatcgacgacgatggccaggtgttccttgttgtcgtgattgttgacatagaggtgcagaaagatctcgccgtgtggagtaggcacgcgtgttcgagcgtggcacttgataactagcggttcgatcgcgggttccaaagccggttgcgagggagcattgttaacgggccgagactgggagaacgaacgcggtggccgaagcccctgtggttgctgagattgccccatcgacccggatcgatggaacgaccgtgacattgatgtcgggggcgagctggacaacgtggacgacgaaggatgatgttgcagactggccgagatggtacccggatccacagacattctccgccgagtgagcttttgagccgggtataactccctggtcgatcccggcgaggtcgacaacgcggattcgtcctccctttgaccaggatcggaacctagcgcgtgcgaaccgtcttccatgatggtcctcatccctcccgaacccgagcctatcccgccaacagcctcacccctcatccctgcgcttccggacctcttgtgaccttgtcccgtcgtcgaatcgttcgacaactcggcctcgagctttaatctctctcgacgtggcgcctgttgggaacgcatcaagagggcgttcttgttcggccgggcggagctggtgaatgaagaccgaggagatgaagcaggagatccggacgggtcatcgcaggtcgagtacgagcctgggagtcgacgaggaaggcctgcgaggtggaaacatcatacatcaaaacgagtgagtggaaagtcaaagcgacatgcgctggactgcatgacattgtcgtgtgactgactttgaaactcatgaccaaagtgatttctcgtcgctagaggtgcacttccctcgatcactgcgctgatcaggagaggatccaagggttgttccctcctgggcaactttttcccttgagccgggtcgacgggaggtgagtgcgagtgcgaggtctggtctcgcgtcgtcgtcgacgtcgctgctgaggctgctgcgggaccaccaccggctcgaccctgtctggatctatgtgaagggttggaaggtcccgtcaggtagtccaagatggccaagtccgaggatgtcactcccgctgagtgaggttggcggtgagacgtcgtcgtcatggttgatcacgatggggtataaacgaggtatacggcgggtatcgggttgacccgggtcgtccgatccgaaagtatcctggttgagaggaagggtagcagggtgtcggtcgatagggtagcgtggaaagcagcgggttacgactggctgagccacgaatcgacagaggtgtattcgatgtcttttagcctgtgagagtcccgtttctgatgggatggctacatagtcgtgtacatgaatctatcccgcatggtcatggtcaaggtcatattgccgtgagatcgctgagtcagctcgaagctcgatgccgatgatgggaacggctagtcatgcaactcgcgtcatggataaactcccataacgcataaaccatcacatgctctactgggtggggggtatcgttcattttatgcgttatcgagcgatggattactcggttccacttcgagtccatggtctgccagcgaccccaagctcacacccaaggatgacgatacgatgatggtgatggaaacgagatgatcaggaggatcaagttgaacatggtcggtcagctatcaaagggcccatacacagcatcatcgtcctcgaacgatacatacttgctcattgatactactcgaagctacctctctaggatcacatatacatcatggtcagtgaagcgtttcgcggggagcaagagttgggacgcacgggtcgtcgccgctcgagcgtgacaccgttgatgctgtttcaacgttgcttcccgtgattcgagcacgtattacaagacgctaatctcctgttgcataccgttctttcttgctatccgctcgatactcgtgctcaatccgttgtcctcctgcatcctgaaccacaaatcgatgtcgataccgatcgacccgtgatggccatgaaacaggcaggagctatggataacgccaagcgggatcttcccaaggtgagcccatcgagataccccaccccgatcaaatccagcgcaaatttctcaccttgccctttctccctcccgatcgagatagatccgcgatgaacaccgcgaatccaactttggagtcgtccacggcgtctccgggcccgtcgtcatcgcctcccaaatgcgaggagcggcgatgtacgagctcgtccgtgtcggtcacgacgagctggtcggcgaggtcatcaggatcgagcaggataggtgtaccatccaggtgtacgaggagacgagtggagtgacgatcggggaccccgtgctcaggacggggaaacccttgagcgtcgagttgggacccgggttgatggaaaacatttacgagtgagcgcgatgaccagtgggtccgatcgcagtgaaaaggacgtcggctgatcgacctcgtgacgattgtgcttctgcagcggtattcaacgtcccctcaaggctattcaggaaaagtcgcaatccatctacattccccgtaagtccaccgactcgtgccaatcgaatcactctctcgaggtatgtactgaagggcaactcaatgcgcgtgcgtataggtggtatcaacacccaggcgttgagcagggaattgaagtgggactttaacccgggcaaatacaccgtcagttaatccgtctctccgccagacaggcatttatgaaactgaagcatcgctgatgctcgcttcatgttccatgcacaggtcggggaccacgtctcgggtggagacgttttcggtaccgtctatgaaaactcgctcgtcgacaaccacaggatcatggtcagccctcgagctatgggtaccgtcacctggatcgccgagaaggggagctacaacgtcgacgtgagtatttcgtctactgtctagacccacatccgaggtataaatgcgtgagagctgacgctgacgctgttattcgacccgtgatcaggatgtcatctttgagaccgagttccagggtgtcaagacgaaacacaccatgatgcaaaactggcccgtccgagctcctcgacccgtcgccgacaagttgacggccgatcaaccgttgtttaccggtcagcgagtcttggatagcttgttcccctgtgttcagggaggtaccacggccattcccggtgctttcggatggtaggtcacagagtcgggtcagatcgtgaaagaagagaacagagcatggctgatcagcgaggcgtggcatacagtggaaagactgttatttcacaagccttgtccaagttctccaactcggacatcatcatctacgtcgggtgtggagagcgaggaaacgagatggccgaagtcttgatggacgtgagtcctcggctcgactgcctcgtcatttccgagtgatagagactaatcgaatttgcggtgcgtgaatctatctagttccccgagctcactctcgagcgagacggcagggaggaacccatcatgaagcgtaccgctctcgttgccaacacgtccaacatgcccgtcgccgcccgagaggcctcgatttacaccggtatcaccctttccgagtacttccgagaccaaggtcaaaacgtctcgatgatggccgactcgacgtctcgatgggccgaggccttgcgagagatttccggtcgtttggcagaaatgcccgccgactctgggtacccggcttacttgggtgccaagctcgccagtttctacgagagggcgggtaaggtcacttgtctcgggaacccgtcgcgagagggtaccgtctcgatcgtcggagcgtgagtcctgtcgggtcgagatcaaggcaaatgaggacatggtgactgatgctgaagcccttgtgtgcaatccagcgtctcgcctcccggtggagatttctccgatcccgtcaccaccgctacgttgggaattgtacaggtcttgtgagtcatggctgcagtctggtaagaggtcggactcgggctggactgattgcctttcctgcccacgtcatagctggggtctcgacaagaagctcgctcagcgaaagcatttcccttcggtcaactggaagtgagtcccttcttcatttcaaggcagatggagaagagacaaccccgatctaaccgccgccgatcgccctccagcttgtcctactccaagtacctcaaggtcctcgaaccctactttgagaagaacactcccggtttcaacgacaaccgatcgaccatgcgtgagatcttgcagaaagacaacgacttggccgagattgtgcaattggtcggaaagagtgctttgagcgaggccgacaaggtcacccttgaggtcgctaccatgatcaaggtcagtcttggtggcgttgagcatggtcgaatcggctgctgactattgagagattgcattgggtcttgcaggacgacttcttgcagcagaacggtctgagtacctatgacaggatgtgtcccatctacaagaccacgggcatggccaaaaactacgtcaccttctacaatgccgctctacgagccgtcgagaacgggttgacctggtccaggatcaaggagggcggttccgatatcatgttccgattgtcgcagcagaaattcgaggtgagtcgagcgttgtgaaacggtattcttgaggaaacacagcgctcagcatacgttgctatacacctacaggaacccaccgatggagaggaggccatcagcgagaagctcggccaattgaccaaggacatcgagagcaccttgcgagacttgcaggactagagttcgagggaacgattcgattctcccttgcgctgcccattgataccctttcagatcctcttttagattgttcctctaaatcccgaacatgtctctcgttgtgtgcgctcgtgtatctctgtcttgttcaacatcgttcgtgctatatatatatatcatgcggtcgtactctatcgctgcttgtcatcagcattgagcttttcgactgaaacgccccatgacgaatctgcttccgcgcatggcagcaaccgtcaatgggcgtcgagatgcacatctgccatcaaaccacttcctatcgcagtcgccgatcccaacttttttgtccttcaaactagaggcatgagagttgcagtcccaaaacgtttgtgtatcatgatccctcctgcttgtcattttcgctgatcgaaagcttgctcgcagcgacagttcggcaataggcagacccgatcgatttcgaaacctcctttgacctagtaaacaacgccctatcgcacggcatcgtaagcttcgaccgcagagatgatgcggtgtttattcctaagctaatgtgtaaatagcttcatagagcttctgcacgctgttcagccgccttcagcatgtcgtctgacggtccgtcgtcctcttgacgcgtcattggtggacggacactgcgaaacggtccacgcaagtgctatgcatctcccccgatcgagagctcggacgatgagaaccaacgtatcactactcttgggaagctacaggcatcagtcatgatgcaaccgtccgaggttgtagtcaagacggaagagagtgctggagaagacactcaacctagccgcaagcgaaggaagggatcctcggaggtagacgatttcggcatcagcaggaaacagcagaaacaacgggaagccaagctcaagatccagaagatacgtgctcgagctgaggctaaagcacaagcggaaagacggcgtcaagaacaggatcgccagagggaagacgaacgcaatctcaagatttaccaagcaagggtggagaaggagcttatgtggaaaaagcagcacgctaagccgaatatgccgtggagaagcggacaaagcttgcacctgttcgatctcccggcagaggtatgcgattttccctacgaacacctttcgcaatgcgtggctgatatcggccgaaattacacgtagatcttggagcagtgagtactgcacgcttcggtcttttccagggcctgaacaaaacccccatttcagggttttagctctggatcaggatctctcagtaggctgactgcgccctctcggtcagccgcgagcactaacataagcgtctccgttccagattaaagactacatgaacgtttctgctacctgctggtacttgcgccttccattcctggacgacatattgtggagggagatctatctatctaggaaaaagagaccagtaggtgagcgcgtggcgagagaattagtcgaaactaagtatctccgtgaaagtcttcccatttagttaccgaccatttcggatgtttggcaaccataacctccgtccccgtccccgagatgtctctaccctttcttgttaatgcaagggttgtcactatacctgccgctacagaatgtcaatttaatgagcttgcaaggcgagaaccacgcattgaacgtgccgtccgcctcactggccatggtcagaacaagccgataatcgactcacgggaagaaagacagaccgaacttctctcgcaaatcaacacttatgcccagtatacctcggccggaaagctattagcccgaagcagatatttagacgaagggttgtcacccaagtcgcagaaagagtgtcaggctctcttgcgatgcttcacttcccgcctacctctcagtcgtactgaggccgaacacttcggaatgacggctcatcggttgaacctgaacattagaccgttcaaatatggcccatggcagactctagccatccgatccgtcaactttccaatcatacacgtgaacgtaagtccaagcctaagggttaatgttcgaacgtcggattgacgccggagaacacaggacgcagtccggaaacactggttgagtcccgaagacctcgcatcgatcaagcaggttccaaaggttagccacgcgcgtcttggaaattgtgaacctctacagcatattgacaaggcgaaaatgtcatttagggttgtcatccagaggccctgtcgaacggcaatgatcagaacgggtgagtgagcagacctactagagagatatctcttaagactataatacgcttcccttcagctggtattttatggaggacatcgaagaactttcccaggatttgagtgatctgatgtgaattcattcgccgcttgaaacactcgggagctcaatttcttgcaactggctcagtgcaatccggaaggaatcgcgagatgaagttatggcttgcttggaaatcgaagcgggccgaaagacgccgcgcgaaagctgctgtgccgtttgctggttcccccacgccgtaaccttcccgatcaagcaccgctggtggtatacttttccagaatacagcgcaatccaagttcaagatatcgaggcgcggatttacaggctcaatgagaaaccattcgaatgcccgtgcggtatgaattgcgatgaggacgactacgataatatcgatgcgtgcactaacacctacgggtggtagtagatgtcttaagtttacctgtcgagaagtagagcagagtatgttggcggcctgtcgccaggagcagattcatagctttagcataatgtcgtccccgagtggcccgtatgaaaccgctgcacggatccgcttccgcattcctggctcgatcgtcccgtgagcgccgcgaagccatcagatcaagtgccacatcagaacaggatttgctgacttggaaggacaagtcatctgttatcgaggtctcaaaggctgactatctgcatctggttctcaaccagctaccagaagcattgcagcaccgttgtctttatcggtccaccaggtcgaaggacgcacaaaatcgtttcaatcggcacacataagtgagcgagtgcggaaagcaaaccacagacttgcaggcatatgactgaggacgtgctaaattcgccatccggatcgctctagatctacccagaagcttctcgtaagctaacgaagccatgcctgagaataacgagagcatcatgctaacggcgaccggccgcgtgttgcgaagcgatacccgcactatgtaagcaatgatctggccggcgtctctgcgcgaagggcatcagatctgaacccttcctttccatgtccaagttcctcttcccaaccgactcagatggtcttccaacaactaccggacccgacccctgaaaagcgaaagcgaaactccgatcccgacactaccggaggcgacccgtgttcgatggaagtcaaatcagacaagcgaaggaagtggaataatgggaagaaactgactactgcgcaaaaagcttataatgttcgagtccgaaaagaagcccgccaggccaagatacacctattcgatttaccgcccgagttaagttgtttgccttgccccatcttcttgtcgatgtcatagctgatgaatctagctacaccgtcaggttcacgagatgtgagagcctttcttatagtagccatccactggcgagagcggggagtctgatcgagtatccaatctatcaggatcttctcactagagcaagacttatcggcaagtcccgatgagactggcctgagtcgcaccacttactgaagtttccctcacacagatcaaagactacatgtgtctttccgcaacttgctggtacctcaggtatcccttcctcgacgacaagctttggagaagtatatacacgtccggatactgctcgagttcttcggtaagagtaataattagctcccataacctgtgtgactgagattcccgatcgccgttcctctatgtcagcagcaatgccgtatcgacgacttccagccgatcaaacctacaggatcatccggcgatacagcggcaacgttcccgattatgaggcgagggcatgacttctgtgaaactcggaaaagcgaagcctgcagattcgactgggcgacagaagggcaagtcacgcccaaggcgatacgtttcatcggtcatgagcaagaacatccaacaatctcacctaaagcggaacgtcttcaaacccttgtcgacaaatacaacgaatactcgcagcacacgattctcgaccgttgtgatctccacaccacatattataagagcttaaagccgaagctgcaaatacagtggagagaatgcttgaactggtttgcggaacggctccctttgagtcgaactgaagctttacttgatggagtactcagcgagaaagttctcttaaagaccagaatttggaagtatgggccatgggccacacttgtctacgctcaatcaactttccaacgatgcagagagatgtaggtatcttgtagtcatcagtgcgttagcaaggctgaattttctatctgcgcaggaggccgtccgggattactggttgagtccagaggatcttgatgagctccaagaggtgaacgaggtaagtcgacttgtcatcttttataatatcatgtccttgtacgtgattgtaagacttgaatcttactttctatggcgactgaatagaagcccagggcgagtggtgaactcatgtctgtagacataacacaaatctcgaaagaaacgtccggctggtaagtcgcacagcatggaaacatttgcgcttgaacgcggtgatataaacagtcagattgatcaatttcgtcatgtcctgctcagcaaatacttcagagaggatgtgaaagctattcataatagactttctgccacgatcatgtaagtgacccctacgctaacagcaggagcatagtctatatctttcacgcacctctcttttcgcagcagcgatcgaaagaggagccgcgcaaaagccctaaggctcatggatgacatcaactggcttacagagggaacaccttcctgcttcaagtgccacgtacgacacttgaaggcgactccaaataaacacatctggtggtacgatattctcggacacgactcggaagacatgcgaaagttgcgcaagcgcgtgaaatctcttcaaggtcgctcgcggttacaaggtggatgcactggcgatgacgaatgttgctgctatagtgacgaagggtaagtcgatgtctcttagatcgtaccagtcgtggaaaagacttctagatgtttgtcgtgttggatctcaacccgcgccgcctcgcagctttaaccgtcggtgccttagctgtacggagatatctgctggcattgcttgatataaagcacatcgtgatctactaataatcgctccctctcgatacaacctctttgcacgtaggtctcagcaagatcgtgtgctcgaattgagcggtcatgcacctgatgttggttccgagacatcagatctcagtttcccgtcacagagcaactgcacttaccctgcctgggggtccacgagaggcggatagtccatgaccaatccctccttcacgagcgtgttcaacgccagcaagtaattcttctctccggcccggtcgagataccggcggcagaacggcaaggtgccgaaattcttctgaaccgacttcaagaggcttcgagccgtctgatgatgcagagtgtacttttctggaatctgttggttcaaggcgtaatgcgaacaagctccctaccagcaaattgctcaaattagctgcattgcttcggctatgctacatcaaccagctcacctgctcgaatactcgtccaactcctgtgctcccgaaggtctcgatggcgtaatactcgccttcttccatcttggtttcatcacgagcagaaccgtgcattttgacgatgggaactgtctttcccccatggatggtgtaaggtgcgatcgagtgtccgttcaaattttgaatagccttgactgttgtcatttttttgtgctgtcagccgtgagccgttcaaccgggacagaatgcggcacttaccttgatgcttcttaccgccgatctgtacctcgtaggactccataacctcttgaatctgatcaccgatatcacacagtctgacatcgattcctgcttcctgtatcggatgacaggattcattagtccgcgttctaccgcccttcgccttgtattgcatactgaccctgataccagtgttggtggcgtccttgaccgccgtcaacagagtgtcccactcagggtcggcaaagttcaaggtgaatgctgaatctacgatacgtccgttgacgtgtacgccaaagtcgaccttcaggatatcaccctgcttcagatctgtacagcaagagccacaccatcagcagcgaacaaccttcacaatcgggtcgcccaagctctcacactgcttgtctccagcatttggtgtataatgggcggctacctcgtttacgctgaggccagtagggaagccgattccgctatcaagtccggactcttccaccaaggctcgagttccatcttcgatcatctctgcgatctcggtcatgctcattcccggtttaatgttatcccgagcatacagacggacttgtcgatgaacctcggcagctcgacgaatgtcgctgtaggtcgtctccgggtcggcgtgcgtggtccgttcaagctccttcttctccaccgacgatattcgggacgtcatactatagggacaaaggtatgaaatgtagctcgatgagttagaagtacctaggattaccaggaatagtccacattcttgattacgcactcgtactggtactccacctcctctccgaccgggaagatcccattccggtagattttgctcagtccgactcgaggcggagcagtctgagttgcagcagccttcttcttcttggctgtgatatgatatgactggagatcaatacgtaatcccgggaaatgaagtaaagagccatcagacgaacgcttcttcttctttttcttcttcttagcatctgtacaaagaggttgctctagtttagccgtgatctacgaaggatcttggtggtgtggtaactcgcctccgttctctccatttcctccttcctgcttgtcctcttcatcgtcatcatcctcgtcctcgttgtcctgaccctcgtcctgttgatctccgttcccggggatagccggtgcgccattgaggtccagctttttaacggtatcggcgacctcgcttgtagaggtttctttcaattgtacggtcatcttggttacgataatggaaataaaaccaagtagcaagcagactgcagactcctggaggttaccctgctaagatcaggtgtcgaggcgaattgatagcatatcgatcggtgccttccgttgtcccgcatttcgccagtcgagagtgaaattcacgtgatcacgcccggcacctgtggggcggcgctttgtaccgttgctgcttggtcgcttcacgctcaatgattttttgatgacgtgacaatgaaaggtatggtacaagatgatgttccgagatgctcatagaaaagatgtgaatcgaaacgaatgtaggtagactactgttggctgtgaagttattataagtggtatgagggccgcgcaacgggcggtctggtctgtgtcttgctgcaggtgcgatgggctgttgtgatgtgacctcactttgtcttgacttccacgtcggtattcacttccaggaccggtcgatgtcgtcccgagtgtttacggtcccgggcgctggtgggactggtcgatggggtgagtgactggagcgagccaaatcctggattggcttcggaacccgacatcgagcggatgctgtaatttgatgacgcccttgatagaggtggcgggggcggtggcctgttcgagttgagtgcagcgaggttctgcatcgaaccaaaaggagacagaacgttgggtgtagtatgtgctgtgaggtaaggtgtcgtcgtgcgggattgaccattggttagagagggcgtcggagctcgactcaagctttgtcccaggccgagcaacgagaccacagacgacgacctggaaggttttggcgtctccccgatgataggagcattggccgggatggggctaccgggaacagcgaccgatgtcctgccccggctcgaggaaggatcgactttgcctccagtagcttcggcgatcttgttggccagtccggcgacgagtgggttcggcttgttgtttgccggttggttgtacataaaggtggccgatagcacgatcgaactacccatcacgaacgctggtgttatgcggtagttgaagagaatgaccgatgccatagatgacagaatgatactaagagaggtggcgaaccccttcaggatgttgtccgagtatttgatgaccaaggcggtgatcaagccgccaaggacctgggtcaggactgtaccccaggcccacgcgctgaaattcttaaaaggctcgagcaggattccagccaggcctcctcccgaattgctcctagctgatcccagaaggatgggcagaagagcagggatgagggagaacaacgaaagttgcgcattcctgacccagaggtctgcttttgagcctttgaggaccatctcaaagtagactccggcaagccccgaggtgacgcaggccgcgcaaacggcggcaaagcctttgaaagggctcatctcgtggacagctgcaaccacatcggactctgcggctagctcgccaactttttcgacaatgtttgtgctggacgatgttcccggggacgcgccattctggatttgaacgatcccgacaccagcagcaagcaagagcaaggcgagccacttggacgtggtcagccgttttccgagcatgaagacgctaaaaaaggccgtcgtcaagatcttcatctggtaggtgacctgaaacgtcgcaacgtccaagttggatgccgccgtgtactgcaagttgttctggataacatagaggattgcagggatagacagcttccagcaatccggggagaagatctccttggacaggcgcctccaacgatccgccttgaagcatgccaagacgaaatttcgaacagcctcgacttttccgcttcggggagttccgacgacggagttgtgaccagagaggctgtgatccgacatgttcggtgtgcccgtgcggctcttggctactgggcttcgcaagtgtgactcttctttggtcatgtcgttgtcgactcttttgagggcggtcaacagactgatggaacctttgagcagctcgttcaagagaacggccgatgcagcggaatacgaccgagatggcgatgtcgagattcgggaataatgcatgatgatggtgagaaaggcgttttgtagtgccaatgtcgtaagcctaggaatgcaaacgcttgtgaatgagctgaagtcgcttgtcaagacacacgacgtctgcagtaggactcacgagatccacttgatatcgactcccataatcttgagcggtcctggagactggcccgacagctgcgaagagtccttgctgttgctggctgatagaagtgcctcactcggaacgatcgttcgacccctgtctgatagacgcccattcttgtacccataactctcgatagctttcactagaccaggctcgcccatctggtatcgtggctgtgagccatattcgtttgggttgacgatagtcgggaaagtcgaggtttgcaagaccactggtgtatcgttactcgatcgaccggaggaggatggctcgtagtcctcggtcaacccaggaaaagtgggcgagttgtacgaggcggtcgacgcgttgtggtatgggttgtgatgatgtagcgacgagtggtgagggcgattcggattgaccggatgactgttggcatccatcgatccgttgaagctgtacgtcaagtttgtcaccgggcttgacgtagcggttgccgaggtggtcgcaaaagactgatctcgatcgcggaaatcgttaacgttgttgtgattattagaaaacgtggagaacgagttcgaatgtgaccgagtgtgggggacggtcgtgatcgagctcgaggatgatgactgggagatcgtatgaggatgagagaaagagttgcggatagggcttgatggcgaggtcgccctgagagaaacgccgacaaacaagatcacagccgtcagcaggtccattctgcgattctcgtgatcacgtagtcgattctgctcacttcgacaaccgccgtttcggcttcgtaagagggcctgtcgagctcatattgtccgaccttgctctcagttcaaagtcaagaggatccgttgtcgacctgctgatctttcgagcggtgttgggcttgatgatgaaggccggtatggtgctcgatgtcgagcgggattcggtagacgaattgaccattccccacctgggccgctgaagggtttcaaaggttgcactggcgagaagagagatggacaagtaggtagagctgtagacggagtgtgaattactagcctgttgtttgggggaatgggcggattgcggtcgtctgagagctggaggatcatatgctgctcgctactcgctcccgctccagagctcctcgtgggttttgcgcgaaccttgaacggcggaacttctctgctctcgttggtcgcgagattcacaataatgtccaattcaccaacagtcgggataagtcagtcttctcgctattcgtacgacacgtcaatgctgtattctgtgacttgtagtctactctcacacagcaactcgaccaggtctgacctgtgcatgaaatttccctcgtacattccacttcgagacgaccctcctcgctcgcgccgaggaccttccatgcatgttgctgcggaaatcaggcgcgcggagcgaatgagcaccgctcgggaaaattccgtcccccctccttgcttgcccctttggagcggtgtcttcagccctcgattcatcgcagatgccagaccggcttcagagacgctatcgagttgatgccaacgtcgatgacccaagatcacaagctggacacctccaaaccgatcctcgtaccgctgctcaattgctgctcgcagattggcttcatgttacatgttgtttatcctcccgacctagacccatgtacccatgtacccatgtctcgctcctgattgatccaggtgggaaaatatattacccccgaagcggtggcgcgcgtctccttccccctcccccttgccgcccccaaagtctgaaagcctgtaaagccatcccacgaggtacctgaaaatggaaggttggctacagtcgaacgcttctcttgcgagaacacatatgttcaggccatcatcttggctccaaggctcattcggtgtacgacgtacggtagtatgctgctttcgcacgctgcacgcttgtcttgcacagacctggccttcgcacagtcccggctacgagtgcatatgacgaagtgattggctcgtctggcatcgtgcaggagtgaccctcgttgatttcggagcatatctatagatcgtcgtcgttcgcgacgagggcacgttgaggcagacgactcagatcagcggctgtgcaggcttcggaaaatgccgcattctgtcacctggtagctacggtcaggacttttagttcggacggttcatcggtatgtatcgcgctggatgcaggcgtcgcctgaagccattgggtccactcccgaccacatctgcggacgtggtgtagctcgccttcgtacaaataacgcagactctcggatagaacactggtatggacgactatatgctcgatggtatctgacgcatcctcgttccttgacggaatttcgcgggacaccagagcaatcatgctcaagagtactataagcttcgttctggatatcatgcacaggttacgaaagaacgggtgctctcctgaatactaagctagacgcaatgttggaacactcccctccgaacatgggccgaagcatccctctcagatcggcttagtcgtgtgtcgagtatacgacgtacttccacgattcattcttgtcggctgatgaacaagtgcccagaggtctggatgaaatgcatccctggtcatactctcccttcgttacgcgttcatccacgaagcgaagaatagccagaccaagcgtaggaatgagttgcgggaccgtgatctgtaagggtaagttggattcgtcggacataagccacacgaacctgcgctgtcctgcatgatatgtgcgagatccgacatgaacctttccaacgggagcgatgcggacgtgcaaagccaaaactaccgcgacgcacagcggaaaaatgatgggtgaattagctcatctcgacgaccgggggtatcaaacgagtatgacctgcccatcggagacttggtagcttggtccgaatattgcaacactgaccgctcgtttacttgcggttggcggtacaagcagaagctcgcgcaacgtttagctttagcactacccacgagccgatctgaggcttgagatcatctcgtccatttgctggatgcgagagagggtcaagaagaaggctatagccctcgagaacaactggacatcaatctgacacgattcgccctgtgggatccgctatgatctctatagcagcaaaagggaaagtcgcgactttggtacgacggcgatatggcgacggggtggaacatggcagcggaaatcatccggtatttgaaccagatggtcttgatggtggggatcttggccaccagggtgttgatggcgtcaaacacggcgatctgtggctctacaatgagttggatcctggtgtcaattgttcaaagggtcttagcaataaggtaggcgatgtggatcattttcgtttatatctgtgatgtgtttgtctccgtgacgtcacgcgaattcattcgtcgtcataagatgatgaccggcggccatcattcgggactccgtagctgatggggaatcatcgaccatcaacctcctttgcgtcctcttatgcatgtttctgtcctcctgttctagctaaaaggcccatcttgagactgaaagctatactggactatcgtgcgactggcagctcatacccatccgaacagagtttgacgacctgtagattccgacatttgctcgcagtaacctgcctcggccagccaggtagcaacccctcgggcaatccttgagcctgttcggcgaattcggcaaccactattgatatcgcgatactcgaaagatggcacccttcaagctgtccaacttgttgcaccacaacaagcaagaccaggagagacgctcttccgccagcacaacgaattccacccgctccccatcaccggggcccacagcgaacgaactgccgatcgatacgccaatagctgtcaacaccttaagatctgatcacccaggggagcaacgggcatcgcccgcagatgtttacaagaaccaggttgtctctcaacagaaccaagcagttcctcaggtgtacgccggtcttcctactacgaaaaggcaaagctcttcctccagttcaggtatgggatatcaactgctcaacaataccgatgatggtatgaggatcaataccgtgaatatggcgaacttcgatgatagccagagtccaacacctacgcaggctttcaacaatgcctctggattggctcctcccattccggttgttactgtcgatgcgaacggcaacaccagatctcgttcgccttcgatcataatctcgcccgctcagcagggggtatcgagcacggttactcctcttgcccaaagttcggctgcgtccgtcgtctcttcgaccaatcagccacctccatcctcaatactcaacctgacgactccgctacaaccggtcgcgtccgcagacgaggttctgctgaagaatcacccggagactgctgctggccgaaagcttagcaacgcgtctcgagcagtccagccaggcacgtctggaaatattacgtcaagtcagagcatgatgggggtgccgtcgtctgccgactccaccagtcatcctcgggtgactttagttcctcctcattcaccttccactcacgccgccccacacacgcctgcggagatcatacacaaggtcaaggaaaaggtcaaaaatcgacgaggcagtagaagctctcgtcggagcgtcatttcgggcgctgatggaagtttccctgcggacgatgacgacgaagggcaccatcgcggaaagcgagagaggctgaagaatcgtcttcgaggcttgtccgacgcttcatccggaaaacgacactctgcgttgctagcagatgatagatcgagtcgtctgagcgatcaagagtccgatactactgaagactactcgtccgataatggacatcatcgccacagacgcagcggaacagcgtatagcgatgacgacgacgagagcgacgcggaagtcgacactctgagaagctcggtcagccggatgagcctgccggtcacgggattcgccgtcgcgagtaacaagaggaatcaagaattccacgctcttttccatcagatcgatgagggggattacttgatcgaaggtgagtcagcccggatcgctctggtaaatatgcagctagcgggttgatctagctgtcattacccttagattacggatgcgcgctgcagaaagatatccttgtgcatggtcggatctatgtgtctgaacatcacctctcgttccactccaatatcctcggctggatcaccgacgtaagtttatcacaatcggcaattaggtcgaaagtggcttcacgctgatgtcatgttcgcatgttagctggtaatcgcttttgccgatattactgcgatcgagaagaagatgacagcatttgtcatcccgaatggtatctctatcaccactcggcagggcaaggtgagcgagtcctatgacgtcgccgcagacagagccgatacctaatggatcctctcatgtctagcaatacgtttttgcctcattcattgctcgagactccactttcgacgttttcatcaatgtatggcgacaagcccactctaggagccccagtctttatggaggggacgacgagatcactgagtctcccgtcaacatggtgaatgagggcaagagcggggcagcagcggccgcggctgcgaagcccaagtctacgcaaggccctaccaaatgtgcttgcggtgagaagggggaccattatgctgagaaggccatggaggccgtgttcccaagcacacctgagagtatctataacttgatgttcccaagtcaattcatccgagagttcatgtccgaaaatcagaagttgaccggtatgtctctttcgaccgaggagaactatatagctgaagggctgatgaacgccccgcaccagatatccaaatgtccgactggacgcccaaggagcccggctccaagttgctcaagcgtcacttcagctacatcaagcccttgaatggagggattggacccaaacaaacgaagtgcgaaatctcagacgagcttgatcatatggagaccgagaagtacatctccatggtaaccacgaccaggacacccgacgtgccgagtggcaacgtgtttagcgtcaagacgagaacatgtctcgtatgggccagtccgagatcgaccaaagtcgtcgttactaccaaggttgagtggactggaagaagctttatcaagggttagtccggtccgtaaattcgatgccaagtcgattgatttgttgacccaaagctcgctggcaggaattatcgaaaagtcagctctcgacggtcaaaagacctaccatcatgcgctagagaccgcgatgcgtcaatacatcaaggagcacgccagcgagttccaggtcgagggcgatgacggcgagccagccccaatcgacaccgtcgccgagcctgtcactgccgaggtcgtgcatgaagaaaaggtcgttgtcaagaaacctggacgacggaacagggagcacgatgcaaacgctttccaggctgcgtttgactcggtcgtcgatggtatccgcagcctgtgcggcggcattttcgggatcggaaagatgggcgttgacgttgtgcgagacctgccccttagcaaagaagtcctcttcgtccttcttgttctgggacttctggccagcaatatctggacctacacgtcgctaaagcaaaccaagaacatggccaagcacgacgagaggcgggcgaaacgcgaggcgagacttgggtccccttcgacccggtccgcttccatacagcgcgagcagatgactgccgctgtcaaggcatacttcgagggacatccacaaggtttcgaagtcattgaacccgtcggtgacctcgatagcgagatacaggaattgatgatgcgcttgagccagatcgaagagagggtcggctccgctcgattccatctgatgcaaagtcagcttgccagatctccgagagccgataccattaatactgaaagtgtcgcttcaacggacatgcgcggactcgattgatgacataaggacacactcgtatgatgtacaacatagagaagcgagatacacccatatatgtatatacatacacgacggatagatctgtaattagctgataagtatgctggcaacaagttcgacccgagggcagcgcagccaagccgcatcatgccgccaaaaggaagtaccggtccgagaaagtggtgcgcgatcgacccacttgctcaatcttgtcaggccaattgaagaattcgtccgaacttgcttgcgccatcaaaggcatctttccgcatttcctgcctcatctcctgccccttcttcaattttaattatcgggctggttttggccaaacaagatactggatgaccttctcttgcatctgagggggcatatggatgcctaaccctttgtccagcaactgcaatactctttctttcgagactcaacgggggactcggtatcgggctcgagagcggccttggtagcgacttttgtcttcgcggcacattccgccgcttgttctcggctttttctcggctgcttccacgacgtacttgtttaattaccatgagcgctcgaattcatctggatacaactcgtcagctatgttacgattaatcattctagacttgtgcaacttaccctcaatgacagtaaccttttttctcttttcaatgtgtgcgtcatcaaaggagttttttcatttgacttggcccgtcttctgcctcgttgttacgggaagcgacgcggatccggttcctacgcggccgacttcggctcgcgcggtctcgtcaccctctctacgatcgacacaacgcatattcgatattaccatgagcgaagaacaatagcggcatcgacggatatcgaacaaagacctcatagttcgacaaccgacacggcatacgtgataagcgctagtctcgggggatcggagatgtgtataagcgacaggcctgtgagtgggagactacctatacctttcaaccacaacacctgctcttacaccacacgacagaacacttaagcatgtcagacccacaatcggacgcggaacgagtcagtctcaagctgcgtcgagttactgatcattgaagccgagctgacatgacggatgacctatgacgcttcgcctcgcagatccgactcagacgactcgcaagactaggaggcccatccgccacgaccaacccaccttcgaccgataacgcaagtaacgtcacttccgcttcttctacatttcagacggccgtgggaggaggagatagtcgacccgcttcggctttgaacaggctgaatgccaatgcttctcagcctcgacccatctcacaaggcggtccttcatcatcaacctctacgtccacaccggctcgaccgaaatcgtccttgaatgttcctcccgggtcaacaagctcttcgctatcaccatcatactacaacacgtccatcatcaaatcctccactccgactccgaccccgactctcaacctgaacaatgcctcgtccccagccgtacgcaagacccccactaccccttatgcaacgtacgagtcgaacgccatcctcgagatcctctccgtcacgcacgaggtggtcgaatcagagttccctgataaacccaagggcacggtaggcaaggacgaggcggacacgctcttgatcgccaagctctccgtagagggcgacgaagcggggttgacgactttcgagtacctgactgcgtgttggaagaggctctatagggtacaccgagagactttgagggcggtgagtgtgtgctttttgcaatggtgcttctctgggcaagcgggactgactggtgtacgatgtacgtgtcttcgtatcaccagggatactcggaacaggagatgagcaaatggaaagagacgatggagaagctcaaagagctcgtcgtgagctattgtggatacacgctcgaagatccgggaatgtttccacaaccgcctgggtgagtggtcgatcccagtcgagacacgaatattggtcggtggtgctgatggctgcgagcttgttcgaccatcagacgaccggtaggaccggccgagttcctgcctctcctcttggcttccaacccgaccgcctcggatccctactcgagttcatcatccactccgtcgtctgccctctctccgctacctcgtactttgccgctgaccccggccgacttgccggcgttcctcaccgatctcaccaaccgcttcaaggaggaaggattggacggcatcttggagagcgtgtgcagcgagttcttccaagggttcttcaagcggcaggtggacggcgctggagtggacctgctggggcaggaatggcgagcgtgggtcggaggagtgggcgtcctgaccagcgtcaaggggatcgcagccaaggtgagtcgccgttcggcaaggtcttcggggcacgatcgattaggctaagatcggtctcggcgtcgacgtcccctctcagcttcctagcttgaaggtctggttcgaagaatcggccaaaccggaacagatcgagtggttctcgttgttgggaccgatcactcggctgagcgtctttcctagagaatttgtcagtacacctacagggtctttaactgaacatggctagccttgctgacatgcttgccgtactatagcccacgatctacaagacctacttcttgaatgccgaaagtcgaagtcaggatgacgtcaaggccaatcaactcaccctcggatcaacactggtcaacctgcaagacgaactcttccaatcatacaacgccatcgttcgagcttctccggagagtcgagaaaagctgttgaactttttcgccgaggtcgtcaggcgcaacgtcaagaggagtgggatgagggtggatcatcggaccgtggcgagcgatggctacatgatgaacatgcagggcatgttgttgaggttgttcgagcccgtcatggacgtgacctatagcaaggtcagtcggacgttgagacgggtgattcgtgcatcgcaagcctgacagctgagatcatggttcttcggacagatcgatcggatcgattcggattattatcgacacagcagacgggtagacatcaaagaggagaccaagatgagagccgcacaggatgaagccaacgagtattattccgaggacggcatgcaggtcgagcgtaagttggccgttccttgcgcatcgacgcgtgtcggaaatgatgaaaggctgacacggtgagaccattcgtgtagccactcccggtagctcggcctttatctcggatatcttcttcctactgcaatcctaccagcacctcggtctgaataagacgctggataatagggaccgggcggaaaagaacgtcaaggagtttaagaaggatcttaagcggttagaggcggaaaaggccggttggcaggcaggagtaagtatggacggatttcgctaggacaagaaggtaaactgattagaatggcgtaaataaagacccctcaagctgcgcaaggggaagccatgctggcgaaactcaaggtgtgtcttagtcggcatcttcggccgggtgcgcaagtttaccaggagcgactttgtcatagaacgatatcgacgtgctcaaggcttcggtctgcgcctacgatgcggccttgttgaacaaggagatcatccagaagaacattgccttcttgagcttcagcatgacatggctcgtcaggctggttgatccgcgacacgcccatcctgcgcaaatgatcgagtgattatcggtcgatggctccagtcggttcagaatcaggctgatccgcttcgattgcctctcttctctagtttacctcttcccgaggaagcacccgcccggttccgaatgctgcccgaatatctgctagagaacatctcggattacctcgagtttgtggttcggtgagccatagtgcgatcgtcacgactgaagagtcgggctgacggtaaagaaaaaccgcagccacgcccccccagagacgctcgacaagagcgacaaggacgtgatcatcacctttatgatcgtctttctgtcgccaaattatgtcaataatcctttcttgaaagccaaattcatgtcggtgagtaggcggacgctcatgaccttttggcccaagctgacgtgcctggggcgatcagatgctttcaataggtgttcagccatggggctacttccgaaagggtatcttttatgacaatctggttgaacacccgttggcagtgaagcacctgatgccgaccttgattcgcttctttgtcggtgcgtatcagttgagcgtcaggagggcgtgcacgggctgatcgcagacgtgtcctgtagacgtcgagatgaccggtggtcacacccaattctgggacaaattcaatttcaggtatgggcttgtaggtggcaacggcatctaggccatcccactcattcgggtcgatctttgcagacgagacatcgattctatcatccaagcgctttggagcaatcctgaacatcgaaatgcctttgtcaagaccaggcagtaagtaaacgattgatgcctgcgttcccgttctatgctcatgtgaacggtcctgtttagcaccgactttgagctcgtcatcaagttcagcaacatgttgatgagcgacacgacgttccacttggatgaatcgttgacgggattggccaagatcaattcgatccggagcgaaatggaggatcgggcgacatgggaagccaagccagaggccgagaagaaagagcttgaatctcaactctcatctgccgaggcaaacacgccctttcacacgatgatgggcagatcgcatgtcaagctgatgaaggagtttactgcgacgaccaaggagccgttcctgactggggaaattgttgggcgtctagccgccgtgagtggggtccttgccgtgttcgtcccggacgacgctgacagaaagggcgcaattcgtcgtgtagacgctcgacgagaatatggccgtcatggtgggacccaagatgcaagagctcaaagtggccgacccggagaagtttgcctttaaacccaaggagctgttggccgagatcacccagatctatatcaacctcggagacagccccgagtttattcgggccgtagcagacgacggacgatcgtacagcaaggcgacgtttgaaaggctggtccgggtactgaagaatagagcgatcatgctggacgccgaaatcaagcaggttttggcgttcttggccaaggtggaagaggccaaagcgaccatcgagatcgaggacgaaagggagattccggacgaattcttgggtgagctaccgatagaccggtattctacctgaagcacatgttgacgatacgttttacgcttgcagacccgctcatggctaccctgatgaagaatccggtgatcttaccggtctccagggtcacggtcgaccagtctacgatccgcgccgtcctgctttcgaacaacaaggatcctttcaacaacgtgccgtgagtagtatctggcgagaatcgctacattcccttgactcaagtcggttcatctccttgtgcagactcaagtatgaggattgcgtgccagatgaagatctgaagcgacgaatagatgcgtggatcgctgagggtacgcggccgagcaatatggacgagaccgtcagtatggatgtggacgaggtcgccaaccggccagagtaaaggctgggcgtcagatcgaggtcgatatgagatggccatcactgtatcttttcctctgggctgtatgaagagagccttgagtatgctttgtggtgatgaatcctgggtttaccatatttcgagatacggtcggccaacccatcatcgatcctccatcaacttcgggccggaagcaaattctttcaattcgagcgaggttggggtatcatctcatatcctcgtagacttttggtgctttcgtcgtgatcatttcgagctacacgcatcctggttcagccccggacatcaaagtatctttgtcattcgtagtatcatatcctacgtttcaccaaaatcatgtcgcaaaagacggtaggagttctcggtacgtcgcgcgagacctgaacgtgacattgaacgttcaagcagcttatcgaggttgatcgacatctttcaggcggtggccagctcggccgaatgctatcccaacccgcatcgctcttgggaatcccactcttgtttctggattctggcgacaagaccccggccaagctcatcactcccgttccagagggtcacacggctcatcctgatggacccttcaactctcgtcctcacatcctggatctcgccgaaaaggcggacatcctcaccatcgagatcgaacacgtcaatgccgacgtcttggccgaagtcgaaaaggctggaaaatgcgacgtccagcccaagccggctaccatcaagttgatccaggacaagtacgctcaaaaggtttacctcgaaaagcacggaatcgccgtcgcacctttttccgccgtcagccaggatgcgtcccgggacgaatgggaaacgctagagaaacagttgggaacaccgatgatgttgaaatcgaggaccatggcttacgacggcaagggtaattctcccttggccagcgtctcacccgaggacgtttcctccagcttggcccagctcggtgcaggtacgggcgggaaagagctctcgctatacgctgaagggtggatgccgttcgtcaaggagatcgctgtcatggtcgtccgcaacgtcgctggagaggtcgtctcttacgacgccgtcgagacggtgcacaaggattcgatcttgcgggtctgtatcgcccctctgaggatgcacgactgggacagcaaaaaggcgggagggaaatgggaagagagcgtgaacgctcgggctaaaaagttggccgagcgtgcggtgggcgtactggacggagctggtgtctttggagtggaaatgttcctgatgcaagacggtgagcaccgaagaaagtgttccggcgatcgtgggtcagaagtctgactcgtttccccgtacgtgatgctctcacaggctccttgttgatcaacgagatcgcccctagacctcacaattcgggtcatcataccatcgaggcgtgccacacgtctcaattcgagaaccacctccgggccatcctctccctccccctaggttccacctcgctacgcgtccctgcagccgggatggtcaatctgatcggaagctcatccagcatggatcccatcgacaagaccgtccggaccgctctgggcgtcacgggcgcgagcgtccacctgtacggcaagaaggaatgtcgaaagggccgcaaggtcgggcacatcaccgttacgggagaaaacgacgccgtggtcagggagaggatgaggacgatcttacagtcgatggaagacattgacgaggcctgggtcgccaagacgatcggttcggatcccaagtcgaactcggcttcgggcgtggtcaagtctcaccctcaacccttggtcgggatcatcatgggctcggattcagacctcccgaccttgttacccggggcgaggatcctggacaagtttgagatcccttacgaattgaccatctgttccgcgcatcggacgcctcagcgaatggtcgactatgctaggaacgctgcagggagggggttgaagtgtatcgtcgccggagcgggcggggcggctcatctgccagggatggtggcgagcgagacggccttgcctgttgtcggtgtgcccgttcgagggagcgtgttggacggggtcgattcgctttacagtatcgtgcaaatgcccgtgagttagagctcgttccagtcggacatatcagggcgcttttcacacgttttgtgctgactcacttgcttcccgttgacttccagcgaggtatccctacggctaccgtcggaatcaacaattccaccaacgccgctttgctggctatccgaatcgttgcggcttccgacccaaagctgttgaagcgggtggaagagtacgcggcgagcctcgaggaagaggtcttggacaaggttaacgcgctcgaggagatgggatgggaagcttatgccgccgaaaggttgaagaagtgagagtcgtagagtggtcaatgaggagtctgtacgagtttctcttggctgcatgtcatatatcaattagaatagaatcaggtcgtccctgaccttgcatacgatcgcagtgtccccccgcgctaatttccgagatggtttgggtgaaatcgaccgatcgaccgatgtcgcaaccatgtttgtatattgtatcatcattacacttgcacttgttcaacaaccatacccctgtacacctcgtcctcccagatctcacaagcacgacatcttgcttcgcctataatccgtgtgtaacccctacataccctctctggccgactttaccactgcattctcgcttcgaaatgactcaaaatcgtgccgcgaccaacgccgacgagatcgctcaactctaccaacaggtactcaaaacagcaggaccgtggttgaagtcggcagatgacgacgtcctagccgatccagctacgatcgcggcggatcagagtcgaaagcgaccggcgatcgttcactcccagacggccgagcagctgaacaaggtgctcgacctgaacattggggagcaaggtgtcgaggacatgtccgacctgatcgacaagatctttgaaaactcggtcaataccacctcgcctgggttcatggacaagctgtattcctccccgagcccaccgggtctcgcagcggacctcatgctctcaatcttgaacaccaactcgcacgtctttaccgtctcgcccgccctcaccgtcgtggaaaagtacactggcaaacgcttggcacaccagttcgggttgagggaggacgtatcgggcggtgtgagcctacctggaggtgcaatgtcgaacctcacggctttactcgtcgcgaggaatatcatgttcccacaggtcatcaccgacggtgtcggtagcctctcgaaacccctagccatgttcacctcggatgcctcgcactactcgatgatcgcggccgcgcagaacctagggctgggtgggaaatctgtgagaaaggtcgcctcggtcgacgatgccatggaccctgaagcgctggacagggagatgcaaaaggctgtggacgaagggcacgttcccttttacgtcggagccacggcggggacgaccgtccggggcgcatacgacgacctccgagcgatcgcggccgttgcgaaaaagtacggagcgtggttccacgtcgacgcatgttggggaggaggtgcgatcttttcccctacccacaagcacaagctcgacgggtccgaattggcggatacgatcgcgttcaacccgcacaagatgttgggggtcccgttgacttcgtcgttcttgctcggacgggatctgaggacgttctggacggccaaccggttggaagcgggttacttgtttcacggggatgccgagctcgctcagagcgatgccacgtccgatgcaaaggccgggtcgaacggacaactagaggaaggagaggactggaggacgagcgccaggatcatgaatgcgcctcacccagacaaggtcgtcgacatggcccaattcacgacccagtgtggtagacgacccgatgcgatcaagctgtacgctcattggcggtattacgggaccgaagggatcgctcagcacatcgataccgctttcgagggggctaaaatattgctcgacctggttcgacgcagcgagagcctctccgccgtcgaagccggggatcctccctgcgcccaagcctgtttctactatgcgggcacaaaaggtaatctcggccctgaaaagagaatcacgagggagattgtcgacaggctcgtcgattacggttggatgacggatttcgcaccaggaaagaccaaacaggaagaatacctccgggtggtctgtaaccgattgaccacggagcagatcatcatcaacctcgtcaaggcagtcgagattgtcggtcggcaggtcgaggccgagtgggacttgtagcgaggttccccgtcggtaccgatgaaatacacaaagccggctcggacacgtccgccttggtatcgcaaatcccaatgggcgccggggttgcgcaactgctaatgaccaagcgcgtctttgacttggattgtcattgttgcgattaccgtgttgtgaatgacatcaattattgtgggtcgcggaagagacggccctccggctgagatgcgtgattcatccggacgtgtaccacatggacgatcgagcgttgacatacgcttcgcctgggtcttggcgtttcggagcatttcatgagcaagcaagaatgagtctggtggcctggtggtcatgcgatctgattcatcgaacccgtccattcactagaccactagccataagccctcacattgggaacgcttgcactttatatcatctcgacgaatcgcgattcaaggcggttccgcgatccaagcgagctaaccgaatcacgatactgccgctctttgacgttgctaacctcgttgttgactcggacaagaccgggatcttcaggcaccgccctgctcttggaccacacatataatcatcccaacctcgacgagtctcaacaatcagttcatgtcctagcctcttcgacatctcgtttacatctccactgcgaatcatgtcgtcatctcccaagcatctcaacatcggcgtggtgctttttcccatggcactgcctctcgagtcagtacaagctcaacgccgacgtccagtcgcgacatgactaatgctcctcctcatcactgccctgctttacagctttgtcgggtaagctacaaccacgacaatcgcactacatcgagatgtcacattctgattttgccctccggatcctgcagtcccaccaccctcttcttcacgctacaaaagaatggcgtactcagctctgaccccccttcccatactctcacaactatctacctgggacccactcttgaccctatcgagctgtccggcggaatgttcctcaccccgaacaagacgttcgagcaagttctgaaagccgagggcgaggacaagctggacgtgatcctcattccaggcggacggggggccaggctcggaccgggtaacgccgaagcgagggctttcgtcaccgaaatcgttcccaagatcgatcacgtgttgaccggtaaggtcgagtaggatcgaatccgaatcatcgctcctgaaactgacgaacgcgtggctaccgcagtttgcaccggatcttggttgctggcagcgaccggttgcctgcggggagaaaaggcgacgacgaacaagatcgcctttaacgagtgcaaggtcggtctgttccctacgagcatcgtccctaatctacccagctcctgaccggttaccgaaacgtgcattcgaatgttgcagaaagacacggccgagtttggcgtcgagtggattcctaaaggacgctgggtcgtttccaacaaattctggaccgcttccggcgtttcggcagggatggacatggcttgcgcttggatcgaatcgttggtcggccccaaggacgccgagagagtacaagcttgggcagagtatacgtgggtgtcagaccgggatcgaacgatacgaggacaagtaagctgatcgttgattcttcgtatgacagtgcggcgggagaggacgacgacccttgggccgccaagcacgggctttaggtacaggtaccgccgaaaagaaccgttttgcgaggaaggattcctgtaataccgacacccagcctcttatcacctctccctatgactcaagaagaatcaatgctagtgacgctattccgtgaggtggctgaacggaccgattacaaagagctgccggctccaagatgtccagagtcagccgcagctcgcgcttgacgtggtaattaccagctcgtggtccaagaagacagatccactgcctgatcatggatcccgaggtgaccttgccaggcattgcatgggtgcttatacaatagtgaggtcatctatcttgcgctctctcctccagggagcaatgtttgatatatctcgggaagccttcgggtgtacacgcaaggccgcgtgggtaagtgaaggtggccgcttctgaaggcgagatcgcgtttcgttcgatcgagtgaggacggagagatttcatacactctattataaatggtgaatcggcctactaagcccatataacgctacggtgctgtctctgctggaacaaagaaatcgacgtgagctccggaacctggagaatttcggtctctttgcacccgaccgctactaacgattatctcggcgactcaaccaaaccgcggtctcttccggggtatgaacagtccatctcccgaggagaccgatctatgccgtagtctcggtgcacgttggggtatcgaaggccgtttcgcaggaggggacgagagctcgtaggcgtccacgtcgataaccaatggtccgggatctggaggtcgagatggtttcaaggtggacttgtcagagactgctacgtagtcaggcgatgtcgacgctattgttggtgctgttgtcatggatcggctcggtttcgacggagatgctggtaccaattttgacgtggatggtaaactcgccgacatcgaaattttcgaagccaaagtcccgggtttcacgccagccacttgtcgtcgaacggtattcttcctcatggcaggtacggatgaacctccggcggcgaaaaaatcgaaatctttcgcgtcatccttgctcctttttgagggcgacgacaaattacttgatggacccgccatcgtggtgtcggtcttggtcgagctaggaggacgggtaacgatcgctttcaagggggtcgtcgatttcgctcccgaggacgaagccacgacggaaggtctccgtagtggttgaccggtcggtcggaacccaggattttcggcacgagattgttccttgatcttgcccatcaacgttttcggagctgtcgtcatcggtgtgatcggctcggtcgtatcagctccgagccaaatctttgagtctggacacgggactcaccagacgtagcacctcttcttccgaaatgccatcctcctcccccagccgtggaagaaatcaccggtccgtccaggaccgtgacgattcgttctgatttccgagacgcttcttgttgatacaacattttcatgtgttccactgcgtttgctcggcgctcagcttccttttccagaactttctgtttgatcccaaagccatgtcaaaaggtttgtgttatcattattgagaagagacatgattcaggcgatgagagatggccgtcgaatcagctcgactggtcgttggtttcgactagagcgttctcggtcgagacgggacttgcagtgtagacctttctccaagacctaggtgggtccggtcgagagttgtacttcgtgtacatctcgggatctttctttcggaggatctccttccacaggtctggataaggataggatcggatagcgtcggttcaaaggtggaggtaaaggtgggacggattagcacaagccacactttgcgactagacacagaaaatgctcaccgttcgtttccgtcttgagaatctaggtgtcccaatacaaagacctggtttcagtgtttacagctcgcagcgggtgactcaaatgcatcccgggctcaccgggctgttgtcctcgatctgagctagctgcagcggatccatcgttttaaagaacaaggggtgttggtggaacctcaaaggtccaacatcgtcataacgattggcgcatctcatgaccactacaagcaccaagatatgcaaggtatcattcagtagctgatttccgttcgaaatcttcgacacttgggcggacaactcaccgccttgacagaaatcaagcaaggtccgaggtccaacgggaccctgatcgaattcttcctcatactcgagccagtcgtagttgctgtcctccatcgggttaagattagggaagacacgagggcgctattgtgtcttgtctattccagtcgtcttgggtcataaagtggtcgacatgaacctgaatactgtacgatgccatcatcatccatgccatcatcatgatctcatatcgattcagggcaaaagtcgatcttcccaatctcgctacggaagcaaatttagtccagaatttacttccgaaagcggccaagttacggaagtaaattacatccgagctatgacgaacgacgaaatgtaggtcgagttctctcaacttgaaggaaatctgatggactgagactgacttgttcatgtcgtcaccacgagctctaccggataggaaggtgcgaatcaagctcagaactcaatagcaagatgtctcaacgtcagaaaggtcccgagctcgtgctcaacactggtaagcgggtcgcctatccactgcacctggctctcgcatcgcatgatctgactttggctcggtaacccgatacacagcggccccgattccttccttaggcttgggagtttaccagctcgagggagaggaatgcaaacgtgtagtcttggaagcgttgcagatgggatataggttgatcgatacggctcaggtgaggatgacgctcgacttggcctagagtggaggttgatcaggctcggccatttctggatgtaccccttgcagttctataggaacgaaaaggccgtcggacaggccgtccgtgaagtgagtccgaggatttcatttgcttcgatatgatgctttcgcaacgccaaaggcatggctgaaagttctcctcctattgtagtcaggaatcccgcgtgaagagatcttcgtaacgacgaaagtgcaagccggtggtcacaccccggaaggatgcagaaacaagatccaaaagagcctggacgatctggacataggtccgtcggttcttctcgcccctcgctcccgaatccactctgtcattttccggccggctgactcgaacccgctttttacggacgactaggctatatagacctcttcctcattcacggcccgctcatgggcccggagaagagggtggagacgtggagaaatctcgtggagttcatgcgacaagaagaggatgacaacggtcgaggaatgtctcgagtccgagcgtgtggagtcagcaatttgtgagtctcggtttctctgccgtgtatctgacgggggggcctgaatcgatgatcccagcggaatagcccatcttgaagctctagaggccgccgctctacccgcaccgagcgtcaatcagatcgaggtgagcgatcggcacgcgtgtccggacaaccggtcacgcccacgccctatgagacgacattctgatgatcatacggcgatccccaggttcacccacacctgcctcaaacgcctatcgtcgagtattgtgaaaagcacgggatcctcgtacaggcgtactgtccgttgatgcgtgggcagagtaatgaggcttctctgggtgaaggagccggctgggcgggcaaatccgggttcggttgggaccacgagggcctgaagggggtggcgaaaaaggaagatatgaccatcggacaggttctcctcaaatggtccatccagaaagggcaagcacgaccgtctttcacctcgagtcttgtaccgactggctgatcatctacgtccacgcgtcttgctccaccaagtagattctgtccacaagccaagacgtcgtcttccgcgcgactgcgcgagaatctcgacgtcctctcgctgccgccgctcagcgaccagagcatgcgagacttggaagaaatgaatttggaaggcagggagcaggacctcggtcgactagcgctcgaatggaatcccgtagactgcgcataaatgcgatgggaacgataagcggcgcgaccgctgggtcgcacgaggtgcccctcccggctggcaaacgtctctcgggttgccgatttgaatgtgtacgctcgtgtcagaacgatctttacgccattggaagcgccaaccttcgatagcatctgtcgactcttatctcgcttatctgctggaccaaatccatgaaattgatcgtccgcgtgatcgacctatgggctttttgaatgtggtatctgattggtcagcgattcggtttcgagcatgtcatgaagctggaataccatctcgaaacgagctcctcgtcgttgtcttgtcacacgacctcgtcctggactctctgttttgctcggtgatgctctggctcagatctgccggcctttcctctctcgagcggacatctgaatagttgtccatcgagatgaacgcttcgacctttgacgatcatgaccgaacccccatcttgcactacaatatgagtgtcatccaaccgccataatgctaacgagtccggctgtcctctgatggacctcaacgggtcggcccgaaacgtttcagtcatgtcatacgaaggtgtactctaccctctcgcccccgaagtcagggtgacgtgcccgggaacaaggtcttggctccagagtatcatcctgcggcaatcctgtcgactaagctgcagccctgattcctgctcgttctccatccaggtctagttcagggaagactgcgctcgagccgctcgttcacgattttatgtttttatttatttacgtttgacagaaacccagcttctcgtcccgagttcaggtatatagtcggcttgcgtgacggactagcctaaaagtcgcactatcagacccgtccagcccagcctgatccccgagcccagcctgatccccgagcccgagcccgagctggggaccgccgattatactctttcgacttaggtcgtgccatatgaatcgcctcccctagaacgaaaagctcaggggacgacgggacgcggtcgactatcagtacctagatctcgagaatttggtctttaagccgtacatgtgcgtgcgaggctttcgaaaatggcgattcatcaccctgctagagtcgtcgctcgatcggatcattagagggtcgctgcctctgccgatctcgcgcaactaccgttccaccgcagatgctgcgtggtgcgggttgcagcgacgatatcccctgactcgggacaatctcgacgagcagcccaacaagatacggcaggcatttggatgggagaatggccgatatcactgggattggtatcaacacgacactcagttgcaagtccgattcctcgacgtttaccctatcgcactgtacttgcaccccaaagagtatggttgaagggatactaatcggctggtgatcgatggaggagacgtttgtttcagaagtcgagttcacgcagagaggggatgtcgtcgggtcgggagatcgattcccggacccggcgtccgcgaggaaggtatgaaacatgcgtcacgggtcgggtcgggtcgggtcatgaacaggactaagaatggatctggggtcatcaagccgagccgaggtttactgtagggattgcatgggacgggaaggttgttgaacggccatctaccctcacgagcgtaggttttggtatgtgatcttgggatgatagtgatcgtatgcctgagcagcaacatacggtttcgtactacccgacggtcgtacgcaaggtgggtgaggaccatatcgacgatgaccttttgacgattcgatctcggccgatctgggacgccaggacgaacgtcgagtgtagctagtgtagatgggttgcagagttggtagtagatgatcatctggacgtccgaatcatagcgctcttgacctaggagaccagggttacgtgagccctgtcgcgcccgatgatcgatgacctggagaggttcgatgaaacgtgatcatcctcgaactccccgtcgtcgtcgtcgtcgcccgggaacgagatgcgaagacggagggtggctgtgccccgatgtctcttcttcccggtcacgccctccacatgcatgcatgtcgtccccggtcatgggcgacatcacccgtgccgacctccccttgaaacgccggtaggcagcaacccctttgggttaaatttagacccgtccgcagttcattccgtgtggtccccccccctctgggccttgcgggttggcacggatggatgtacctgggttcacagtcggtcgtggtgtgctgcttgcgctgtgctcgaattgcattgaaagcgcgcgttggcacacgacggaagtaatcatcattccgcgtcgctgcccccttacgccttggacccattgttttggttgatgaggatccagggggttgtcatctatttttggatttttcaattgattgaggggggacgggggggcgaggcgaggcggcgaggaggacgaccacggtggcgatgatggcccgggttgggtggattcaaaacaacgaaaacacgcaaaaccaccaacacgaccaacgaccgaccacgaccacgaccacgacacagccagcaagctaaagctaacaactcatcctacacacctacattctcatatctaaacttcgattctccgacctcctttctacatcgcctccttcgactcgtttctcatacacacccgacctcgtcgattacctctacttttcaaatcgtctctacatctctacatacacctaccaacgcttcagttctacctagccaccttgcatccaccctacctacaactttgataaaaacacacaacaccaacatgttcatctctaccctcgccactctcgccgcgttcgctcccctcttgaccaaggcccaggtcaccgctaccggtaccaacggtcctaccaaccccgccgccccgacttttgccgccgtcggtagcaaggtcgaccaggagagtatgagcaggttgatcagtctcaacagcgtgagtcgtcaggccgagggcatggcaatagcatgatcatgtcatcgttcttggacagagaaatctaacttgatcttcctctccccctctcgttcgcgtctgcgcaggtcaacgatttctgcttgttcggtccccccaaggacgacaactcggagatcggtaacatcgagggcgaagtcgtcgcttactgctctcaaccccgaaacggagcgaggatcatccccgatggagctttgaagagcgctcacgtgagtgtttacatgcattgagaaacgttccatccccactcgactcgagggagacgatcgacgtctcccgtttccgttctgcccttctcgtgttacgcgtgtgatgtgtacccgagcatgatggctgacgccttgaacgtctcacttcatagtacgtcaagaccccgctctacgtccagatctcgggaacttgggacgggaccgccgtagacatcgttgccggtgactacggtggcgagttggacccccacggtgcgaccggtaagtcggacggacctcatcttcatgtcgagtcaagggcggacgggagactgatcaaaggggtttgatgggtcgtttcttttcgtctcgtgttgtaggtgagggtaaccccgtcggtggaaacgttacttccaacgtcagcggacaagacgtcttttaccaggagtggatggtgagtctcgtcatccccctcagtctatatcatactcctgacgtgctggtagctgattctgcaaatgtaacgcgacgcatcattgacgacgtagatgtacgtctcttcggacgccttttgcttgaggatctgtaccgccgaggaccctgccaacaacattaccgccgccttgcagtgcgagcagtgagtctatagccacagtatccaactcgcatgccatcgagactgacccgactcacaaccctcgacctactccagcgagctcgacgtcatgggttgcaactttgtcatggccatcccttacaacctccccgagacctttgacgagtgcgccggtgacgccgccgcgcctcccggtctttacccccagcccgatggttcgacctcgaccttccgtcagcgatacaccggtacctggactcaggacgctaccaccaccggaatcttcaccgtaggaaagaccgtcacccccgaggctccttacacctaccccgccacttcgcagtgcaccacctactcgagcgtttccagtgagtctgcacaagacgccgtgggcgtcgaggtcgatggatcgagatcgatggctgaccttttgtccacaacgcgctttccacagacggaatcaacaccgccaactacgccgtcgagactgtcatctccgagggtgtcatcatcggatcgtccaaccccaacccttcggccgctagctcaaagtccctctcggcctcgtccgccgccatgaccacgggtgcttcctcggccgcctcgtccggagcttccaactcgatgacccgatcgggcgccatgcagacgaccgcaaggaccaccggtgctagcgtttccggagcttcccaggccgccgctaccacctcgggtggagcttccgctgccatcagggctagctcgatcgacggcaacgtcttggccgtcgccgggttgaccatggccggtgccatcgccggattggccttgttgctctaagcgacacgaggacgacgacacacacacgcatggatctttctttttccgatgaaacgattgatgaccgatagagcacgatggacgttacgactgatgtgttttgaagagcgcgcttcctttttctcttttttttctactcctcactacacgtatacaaacacatcttgtcgactgcgcaatcagaccgtttgtagatctggcgaccgagcgacagcgctatggccgctgggttcgttggcgcgttctcttttgacctatacgcatgtcgcattcacgctcgttatcgaaagttgaccggagtcgtgcgttcgcggtcgcatacgtccgatcagggtcgttgatcgtgcgacatcatccgcacgaacgaagaacgagccagtctcgcgagttccgaacgagcatctgtctcagcttgtctggcatagactcgcgaagacccagtcccggtccaggttcatcaacacggcagtcccgtgcaacaggcgcggtgtcgcctcgtcggcctcggtggcaagaacgtggcccttgagggttgagaagtccagtcagagcttacatatgcgggtttgagcctgtatacccgtccccctggcagccttgcgagtctgccagcgatttgtgcaccaagtccagaaacagctcggacggtcaaacgagtctgtcaggagacgacttcaccgaggggtcgcagtccgggtgtagggttcaactcggaaagctatgacgagcgatcgagtggaaactgtggttacagtcagacgagatgggagcgaatgccagggttgatgggggttgaggatgacgaggagttctaatgcttcttggagcgaggggttgatctaagggaggaggcataggcctcagcattcctctctttcaaacgctgtttgccttgaagtgaatgagactgagatggcggcatctcgctttggctttgggatctcgtatagctacacgaacggtcgacactagtgcgagcggaggaagaggatagctggaacgaggagtgatctgaggattttgatgacggcggtgtgactctggcgatgcgcatgtcagctcgttgaaaaggggaagctatgaaatagacacatggaacaggagaggggttgtgattggaacgggtggtggacatcccttgtatcatagcgacagaaatttctggactcgagcaataatctgacatatcgcctgaaacgggacgcatactggcaaccgggccaaggccagtacaagtgcgacgaggaatggtttgctcaacggcaaatcctcaaaattacgacgcctgacccctctactggtcgaaggtccttcgccctgcgcacaccgcgtccgagaggcagcgccccacttgtgggggcaggcaacgatatcattcttcggatgccgtatcccccgaatctacctcgatcgatggatcggatggtgtgcgagagggcggccaagatgtttgagaagtcaaacaatcatttcgtggccatccaggatactctcaagatcgtacttgccacgagtacgtgtcacgggggggggaggtatgaaggcagacagtctgacagcaagaaagtcgtttgttgttttgcgaaatatttacgcgccgttgataacgatacggtctggtcacgtcccctccacggtatgcaatctgcacaatgtagcatctcagccttatgcgcttgatcaaagcttgactttctgaaatcttccaacatcgtcagaatgatcgcaagcctggaacgagcgatatggaaggacagcgccgtccgcgattccctgtcgcagccaaacagaccggtccgcgtgtctcacgaaacgcgcgttatcgctccgtgaggggaacaagacccctgaagtgcgacacaaaggaagcctcagggggcagtcggccatcctaaagtatatagggtcggagtcaagagaggctcgttcagcaattaggcccagcaataggagatattagccgcttttcatgaacggcgtttcgttcgaattccagaccgaatctcaacacgaaactgtatccgccatgccgatcgccatccctgaaaagcttgagccgatgaccccgatcaagcccttgagcgtcggagagaaggaagctgctggcgaagagccagtgcccgatatcaaggatgacatggtcaagcctgacggcatcaaggtggacgagctagaccaacagcgtaagcgtctgcgaaaatcatctcgaattgctattaacgcgccacgttgcgttacagaccaaaagatccagatccagaatgatggaaacgctgaagttcctccgaaaccctttgatgacattttccatccgtccaacgtccccaagcctcaacaggtcccattcacccgtcgtcgtgctgagccgagtgagtttgacacgcgcatctccaccttgcatcaaagctgaccgattcctctcgtctcgatgttcccagttcaattcgacagcctgggagaggttgtgcaacgttacgaggcgcacttgctcattcccatcaagtcgtaccctttgatcaattggcgcactgctctactcggcaccggagaaggcttgcagcccgtcaccttgatggagcgcgagaccggagcggccatcttgatcagaacgatgaaaaggtccatccatcgtaagccggctccgttcgggcttggaggattgagcggagccatgtccgacacttcgcccgagctcaagcgattggaagacgctctgctcgctgtgcaaaataagatcgaccagccaccgagacagcaaccggtggtcaccaatgcccctccgtcgccggacgcatccaacatgcctcttccgccgacccccaagccagacgagaatcccaacggcaggctgcttccgaatgctcctgacgttcggctgaaggtcgccacgggcaattcggggcccgtcacgccggctcccaagtcacctaggatgggcaaggacgaaaaggtggagggagagaaatcgacccatgtcatgcccttgggacagaatcgcagccctcctccgaccaagcttccgcttggcccggtcgccgagacacccgaaacagaggaaggcaaagccatggaagtggacggaaagaataaaggggaaatgcaagccgacccctcggttccgcttcccgcggccaagcccgagttgatcgaagaacccccgaagaggacgggagcggtcggagaagagatcggtctgcactgctgggtcatcggtattctcgaagaggaagtcgacatggcggtcgaaaagctccaggccttgtttgacgaaaagattcgcatgtttgaagattgggctcgcgagaacgagtttgaccccatctggttcgatgaggagaccgacagcgaggacggcgacgaagatgacgccgacgacgtggccgtcggaaagaaggaacaagacaaaggcgacatcgtcgagtcgaagcctgagccaaagagcgacgtcgagatgaagggacccacggccgaggttgctgccgtccgtgcctagcacggccatggtcatgtatttctatgccttttgtaatagatacatttgtgatgcgtgttgttccccttccgatactgctcaccagccggcagcgagcttgctctcgatggcctcttcgattccttgaacaacctgcctttctgtccagagactggtcatgacgtagaccacattcccgagcggtctagagtgcatatgaaatggtgcaaatgcggaagactcgtctgttgagctcgagataggtgaaccttggcgaagcgaagttaggaagtccaatgccaatgatgacgcatatcctggataaacgatgtcaagttagtggtgtggacgcatcggcaatgtcgacagtcatcaacgcaccgccaaatccatcttgggcctcctccttgagctcgatcgcaatcaccgttcccatcgtcatcactccttggactctgtcggacttgctgactcggtagataaagtccttgtcccagaaactccacatctcgccggctttactggactcgtttagccaggatgccttggcctctttccaagctccggcgccttgttccgaggcgatctgttgttcttcgaccattttgagtgctgtcaatgagacgttgcaagcgatcgggttggcggtgtagctgtgcccgtgcaagagggcttcgacctttttcgtaggatgcaagaaagcttcgaagatcgagttcgatgcgagcgtagtcgacagcggaaggagacctccagacaggatcttggcatataccgcaatgtcaggcgaggcacttaatacttccgaggccgaaaggtaagacaatcgtcggagaccggaaaagactgcagcgtccggcaatatcagtatgcgaatggtccgtggcaatcaagtaacgactgaccttcatcaaagatgacgggtagacccttccagtccgagctcgctacactgccctgaacagggccctccgtgaacaggtcttcactttctcggacgacgtccatgaggcatctctggaacaaggggtctacaaagaccatgccaccggctccaaggcacatgggttccagaaccaaagcgccaagccgtcgtcgctctcccgttgttggatccgtctgcttcatgatcgtctcgagcgtcgacatgatatgcgttcggtaatagtccgcaaggggtgaagccaacctagactgcacgtcgtatacttctggtagtgagccgaactcgaccgaccagaggggctcggtatcggccttttcagtgggcgtcagaccgtccttcatggggtgagacggccagtcccgcttgtttccggtagagttgaccaccactttgcctttctggatcttgacttcaggcggtgagaaccagtacccacgacccttgtaccaatcgacggcggtattgtagattccctgatcagaagcgtccatcgacccgatctacaagattccaaacatcagcgagacatcggcgacccagtggaatggtttccagacgtaccgtatcaccgtgataaccaccctttagcccaatgacgccaacattctccccaacaacgccctcccagccatatcgtcgtccacttgccctcaaagccatcttaagagcgacctccatcccggtactcccattgtccgaataaaagacccgttcggcccaaccctttccgaccgtatcgaggagcttttcggccaactcgagagctggcgcgtgggtgcccgaggggaacaagacatgtccgtacctacccgctgcttccgcggccgctatcgtcaaccggggatgagcatgtgtatgcgcttgcctgtatgcctcgtaaagaccagaaccggtcagacggaaacaagggctacaaccagtggaatccgagcatcaacttacgtgaaccagcttgcactcccatcgaacagaggcttcaacatgctctgcgagtcgtttggacgattctcgatcgatggcgacgattcgcctggtttgtagtatgcgtcaaacgtgtcgcccttggcggaatcgatgaccatgacgtctgattccttgttgacctgtcattggcaggacgtatcgcgctgttgatgagcatcgatctcgatagtttttctgaatcgaaacggcacgtaccagtccatgctgagtgaatggccaccagatgctcttctgcgtccgaccaggcatactctccaactcggcgatcctcgcttgatgtcgtcgttctagatgctcgacgacatccatcatactatcctctctttcctttgtcgactgccgatcctcaatcttgtcgtaccactgctttaacaatcggacgtcttcttccaaagacaacccctcctttttgtgcggcgtttcgaacccccagaaatcgatccctcgttcggcaaagtaatccttcaaaaattcgtggttcctgtaatactcgtccttcaagcccaacacgccctcgatcgtgtagccacgggtgagaagactctcgtaggcggacaaggtcgtgctgatccctcctaggtgcggggaagcgacgagcaaggtaggtagtcgcagagggcgaagagagtcgatttgggtcaagggagcgtggagggaaggagaatgaaccccgccagcggtctcgaggtagacggcaccggaaccgtccgtactgcaggattcgacgtattgccggatcttggcgaggaggtgatcattggtctttgggtaggcctgggtttacaaactgtggatgagtactgtcagtggttcgagggaggtttcagccggactcacgaggtcgggggcgagttgtcttgcgaggtgcgggctgacgggctcgcggtactgatacaagttggccgtccggatcctgtccaaatgatccctcgcgttcctctcgacgtatctgaaaacataggcaaatcgacgctcagtgcaagccgttcatgccggtagaagccatctggaggctcacgaaacatcgctctcttcttctggtccggtactgataggcttcaaataccaaacctttttgttgccatctgacccgctcgctcggtcttgctttctataaagcttggcagtcgagcgaagtagcgatgtagtaagcagggtcttgccaacctatgaataggaatgtcgatcatcagtggatagtagctcgaggtccattgctcctcgcccgagctcacatccgtgttggctgagatgtatccgtaagtcacagctcagcttcctgtaaggtctggtcgaatcgaagctggactcaccaccaaagacctgggtcaccctgagtttcgggtataacaaaggcatcttgtcgccgttgcccaggtaggtcagtccacaattgcctaggctgtattctggcgcgattgttagctatagcctgctgacatctggatgagtagagtttatgatatgttttggggatttgaaccaactttcggcgagtcccgacatccgggaatgactcagaaaggagaaatcacgtgattcgatcgtgaaactggatgttgacgggatcgaggagctctgatcgataccccatgtctctctcgtggtaatgtgtacttgtatatatatgcgggtggtaggatggagaaggagccacatgctgatacaacgttgaatatacaaaccgatcgctctgaagttatgactgtcgagcttgtttcaccgccggaccgccgggaccttccgacttgcgcttcatcccgcccggagctgagcctccgttttgatatggtgtctgttgttgctgttgttgttgttgctgctgttgctgttgcatttgaggtaaacgttgtggttggtgttgttgttgttgttgttgttgttgttgctgctgctgctgctgctgctgctgctgctgctgctgctggttgaacccctgctggccgtgcatctgccccattggcgaccccatcatcccgttcatcggcattcccattcccatcatgctcatctggtttatctgctgttgtaccatattgagctggacctgcaattgcaatcgaattggatgcaggaggccgggagtctgcaagttcatcatgatctgcgaccggaaacactcaagtcagtcgatgccatgcgaaaccgatttccgatttccgacgagacgcgcgacttacctgtgccgcttgagcttgcagagccatcatcgggttcatgccgccaatcatcccggccatgcctcccatcatacccatcatgttcatcatgttcatcatcatcgccgggtccatgttgtttccatttgtgttgccgttattgaaaccggccatctggttcgactggtcctgggattcgacggcggtctccgcaggcttgtcttcgggtttgacctctgccgaatccttgtcctcggtcttggtttcggcttggacgataggctcttcagactttgctttgacagactaagtcgatacgttacgcgggggtggttgtcagcctccagcaatgtctctcagtccgttcgaccgaccgaatgctcaccttgttctcgtccgcttcttccttgacctcgggtttcgcctcgtcgtcgctaccctcgccatcatcgcccgcggcctttctttcctgttttcgccgttcgacctcgacctcgacaaactcgtcgacctgctttttgacgtcctcgtctactttgacccccttcaggctcgaaatcttgctttcacaagagggacagacgaaatcgttgtccaacaggtgattgtgaatgcattcttcgcaatacaacgatttgcagcagggagtcctgcaaggcgtatgtaacagccgggtacagatcgggcatgtcagatgaggtggtaaagccagacctccaccggacccgtctgaagtcaggttgagaagttcccctgcggtgagcggtttaggtttcgtcgtcttcctccacgtctgtcggtcgggctggacggtgacgaaagatccatccccggtgatcatgaccgacgcgccgttgacgcccaggtcgtcagcatcagccccatcggccggtttgtcgaccgtcttgaggaaagactttgggatacccgtcgtccgcttgaatctgggcttgccctcaaagtctgggttctcgttcgtcggacaagcctgaatccagtggcctggagatggaacgcaacgacgaaaatgagctcttgatacgacgcctgcatggtcggacgagacagcggtgatctacctttttgaccacacctgaaacagacataacctggtggaggctccttgtccgggttctgcaggtaatgccagttactgctggacattcccgggggcggaccctggcctgaccagttggcagggggtgcggtatgcccaggaccacctccccggggtcgaaacgaaccccgcatggccccgtggacacgcgtttggctaatgggcgagacgtcaagtgacatttcgaacgaagagggggtggagaggcaggtttctgtcagcgcatgttgattgaccggcagtagtgatccgttcgctatggcgaaagctgatccaatagagacagcatccgcaaagtcgatcgacaacatggactgctatcgacgctctcccatctcatctcgattgtataacgatagaaagggacatcccacaacgatcgcagtgtggtacaacaacgtgtccgagaagcaaagcgcaaacgcaaaaagaggaagaacaaggactaactgtgataacgcctcgtgggtctgttcccactcgttgctcgtctcgttgaagaacgcagccaatctagcctcttcctccgtagccgggggtgcgggtgcggcggaatcctgacaagaggtgcggtgcgtcagcatttatgaatcgagatgcgcgacggtatgaaagtgcctcacatcctcctcgtccttcttgtcaaacctgacggtcatgttacctttccccatcatcccgcctcctcgaccaagcccacccagtcctcgcttgttcatgagttcctctcttgaactctgctcgactcgcctatcgaccagatcgtcacggcctccaacggaagcggacgttccggcgatgtagcgtgcggcggtaccaccgttcttcagcttggggtttggagcgattcgacggatgatgaccgatgtcgatcgagggatctgatgatggtcatcggtgagaactacgagggcgagacaaaaagcgcaatgaggtggaacatgagcagtcttgaacgagtagcgtgcgaggctctgaaatggactgaccttctttactgctagcgtccgtcacgctaagatcaaagtcccgaccgctccccatcttggtctgcagcatgacctccttcttgacgtcaaacactgaaatgtgcgtcccatcgaatgtgagccgcgattcggtcgactggtgtgggaatttgaagaagatggtcgacatgttgaggatgagacggcgtcgattaagagggtttgctcttgcgcttgctctatatagagtagccgctgtatgtaggtgcagataaaaggcaagctttcgccaagctctaatgagacaacgacgatcaagctcagcgattgcgtcgattcgccgtcgtcagaaagaaagagtcgaatataggtgggtggtcggctcgtcaacactctcagcagactcgtctccctttctttatctcgcctgtgtggtctttcgactcttttcgtatcactgtaccgaggagcggatggggaaggattgctcaacaagatcccttggcagcaatttatgcttgcgtaaatgcgatgttatgagtgtatagagacaggacaaaggagaggtgaagaaggggatccgtccgaaatctcaagccgggtcctcttgtgccgacgtcgacttcgatgggcgattgcgacagacgtggtctcgaatgcgagcgggaagagcgaaatgtggggaggatactgtgttgagtgattcgatcaggtcggtacagcagtagtaggagtgtacacagtaatggcaggaggcagtgatcgatttcgcgaacgcaccagtagactctgtgtaatccagctgggggatgggggatcgtggcgaggccaacaaggtttcaaaagaggaaaccccgctttctcacgcgaacaagttggagatgtcaaggtttacaatcaatcacatacctacctcgacaaaccaataaaccacgtgcctcccattgcacctagcttggacaccttggacaccgacgaggacagagatccctgactcatttatcatgtcactcgagccacgcgtgcctttgtcccaaaatatgcccattccggctctcatccatagaacgttcactctcttatgctacaacgccgaccctctttcgcttcttgataccctcctcgatcttggccttgaccttcttctcatccatctcgccttcaagcacacctgcgatccgctcggcatcgtccaatcgcttgacgtatttgagaccggccaaattgtacccgaggatatctcgttcgtgcttcaaggcatcccgcaggttgacacgtaacgagacgagcgtcgtgcgtaggtgtcgagtcgagacgatctggtggtgatgcgttcggagcaggaagaacaagatcctgctcgcgagcgggatcgagaccttgccttgaatccactggtccagacagccgaccagcgtcctcacccggtcgaaagggaggacgagaagagcgtcctccaatccgggtcccttgagaccctcgatcactctccttacgtactcggcgcccgtcatccctccttctggatctccttcccgtgccagcgctagcatcctagggttcctctggggcggcaacaacccttccctgaccccagcaggcgccttggcgagggactcttggtaatccttccacgtctgcgcgtccgcctcgcagagctcgagagcttcgaggatcttttctccggccatgagcgattcggccgtctgtttcttgacggcgtcggcttcggttccagcctggtccgcaccacccgcgtcagggtcttgctcttgctccccatcggtacccccagcaccgctgccaacagcgcgatcctctcggttaagggtggagagcaagttgctctcgtacgtctgctccatctctcgttcccgctcttcctccaagaacagctgtaaaggggcccgtacgcgtcagtcctgctagatgaccgagtgtcggatgacgagtgcgtggagactcacaggatcttccgttcgctcccatacccggatccccctgtcaccacctccggtcacgacaaagtcaccgaaatgactgagcgccaacgaccagatctctgaatgatggcctcggagcgtttgaatcaggtcgaactgcgggagttcgttcagtgtgagaagcgctctcatctcgccgtcgccgttgccctagcgctcgcaagactcaccttgtccccgtcccagtacttgacgagtccgtcctttccgatactccagaacaagtgactcccacgtccggtactcccgaacccatcgtgtcccattcccttttcaaagccgacgctcatgatggactcttcgtgcgcaaagatcgacttgtgacaatcaccaaagtcgagaccccaaatcttgatgttcttgtcagccgacgaggtgatgatcaatttcgaatcttgggaaatgtccatcgataggaccggaagctatcgcacaagaccccggtctggtcaatattcggtcgacccgatctcgtgggcgacaagagacgcgcgtaccttgtgtccatacaagctcaagaagaacttgagagaatcctggaaaaataccttgacggtcgaatccagcagactgacggccaagagcttgttgtccgggctatatttgacggccaagacgtcgtcggtcatcttcaacgtcttggtatgcacgagcgacagctgctttgtcttgatctgtagaggggagcgtgaccgaatgagtcctccgacaaacgcgcgcgatggagaggcctcgacttaccactcgctcctcgcccaacctcgtcaagatcttgctcccctcaccagcgacctcccgcgtgcgaatatcccagaatttgacgtccttgtcagcgctacctgtgacgagcccgcccttgtccggccgaacgtcgattccccagataggtcccgaatgcgcctgaacggtttgcaagagggtcgccgacggtagatcaaagagctcgagcgttccgcccttggtgcccaccacgacctgaacaacgtgacgcagcggtgggtcgtcaatgagagggaaggtgaatggtaaccagtcgaggccgacttacatgtcgatctccgggtaagaagacggagcagatcgcgtatccacagtccatcgtacggatgcagatcccggtcttcaagttccacaacttcaattgccctgcgagagacagcggtgggttcaggtccgagcgcaatcgcatcgcaccgcctcgaaccggaacgtaccgttactggcgctcgccaccacctggtcgtccgagctgacgcacagcgctctcacgtccgcccgatgcccggaatgctccaccgtatactttcttacgggttcgatgacgccgttcgtacctgccagcgccttgagtttcttcatcaccgatcccgatgcgctttccgtaggcggggcggggaccgtccaggtctcgagcgagttgttgttcaattgcaacgagatctggagcgtccccgacgattccgaatcgatcagcgaaaacgacctgatcttggcctttgcgcggacgatgcaataatcggtgatcctctccaaccaagtccccgcggcggcctcatcctcgaccttgatctcgtcagcgagcatctcgtcgtcttctcccttgttggtcttgtccttgtccttggccttttcccgctcacgtcttcgtttacgagctcgacgggcttccatctcttcttcgctacggacgcgtacgacctggacggtcttgtcgctggtctggacgtagatgagggggatccgcgagttggggtgaaagttgatgctttgaatgggatgcgtgttggtggacgagttgggaaggggcaaaaggccgtcagagtggatgagtcggttcaactgcgaaggccgcggcgaggcacatgatcagtgtcgaggccgtagaatcgggaaacatttcggtccccgacgtcgatcactcacttgaccctcctcgtcctccctgattccctttcgaagatcatcgtacccaacctcccacaccttgacctcgccgctcatactccccgtcaagaccgtccacctcccctttggaccggcctcttccgtcgaattcagctcttcgaacccgtccgactcgacccgccgctgcacgtcgagggaagccacctcgccacgcccgaccacgaccgtctcgagacaatgccgagtgtcgaggtcccagagcttcatcatcccgtccttggcagtagacagcaggaaccccctcttccccgccgtccccgcagagtccgggtgagggaggtatttgagcccagagataccccctcggtgacccttgagacgaaagagaccgacttcgcccaaaacgtcccagacgacaatctccccctcgacacccccggaaaagaggagttgaccggaagtggagaatgtcaacgcggtgggtgatttcttgtgtccgttgaaagtgacgagttcgtaagcctggttggggaaaccttcggacgacgtcgtactaggaaagttggaggaccagatccgaatcgctccatcggcataggctacagcaaagatcttttcctcgtcgtcctcgacgtcgtcttcctcgccatcatcgcgtttccgagcaggagccgcacagatcttgacgacctcttccctcccaccgggaacgtgccattcgccgactttttccccctttctcacgtcaaaaacgttgacgtcttcccatgcagggacataggcgtaggtgttggaatcggtggacgaagtggcggtgtaggacgtcgcggcgggggaggtgatcagaccaaagacctggtgccgcaagttattgaagtacgatcgtcagtttcgaattcatgatttcagctgtcatgcggttcgtctaacctgagtcgggccatgtcgcgagtaactcttgaccatttatcggacgattctctacggggttgacgtctgtagacacggatttcctcgatagtcgaacaggctacttttctcaggactgtgttcctgattcaaactgatagatagctagccttttagtcgagttatggtgtgaatagttgtgggatggagctagatggaggtcgatcgtctgaaatctcccaaacgcgaatagcaaagtcacgtgacaactttctcgaaaccctcatagagtagatgtgcaaacacatatgcgccacagcctactcagggtcgactttttgcttcttgaggtcgtcttgcatagcgggcaatgtctctatacatggttggattgattcagaatctattaggaaaaactaacgacatgctgatctgagcgtccgtgtcgggaagatgattgacgccctgatgagggcggtcttcgtcaaactcggcgagttgacttgcttccactcgccttctttggttggcatcaagtttcacctgagctccgtccttgcgtttctgggcatgaccggggcgtatggcaattccgtcggctatcacggtcagacctgacatgttcctgttcctgatatcctgcccgcctgggaatactccttcgagcagacccgacaaccaaaccgcgacctatacgaccgggtccatctccccatcctcgttccttttcgtagtacgatcgtttgcctccgtatccgtcgtcggtggcggtggcggttgtgatttatcaggccgttgaccccagatggcgagcaatcgactatcgctcaacacctgagcggcgttccttggttcgatgaaaagaccactatgatcatcacatcagggtcaattgggaagaagaggcagaagaacccgccgaatgtaagaagcaaaagggacgtacgaagctttcgccaggatctgcccgtcgaggtcttcgatctgacccgtcacggtagctttccgcgagacgatcgattcgagctgtgtccgtaccacgatgaactgggtcctcggattcgtcagcggtcgacacgagacggatgggatatgtacgggtagatggtatcgaagttcggcgaggatgggcttacctggtcggtcttggtcggttttaggtaagagatgttcaaggacgcagttacccccgtcttggaagggaggctgaggaaagcctatatgaggcaagacgtcccatcggatcccaatcagtctagcctcaggtctgatattcccacgtcatcgagaggactcacgttcctcgccaacgaatcgtctaggatggtcgcgatgatcccgccgtgcacgatcccttcgtgaccgcataggctctttccaagatgatagatcaagatggcattcgattcgttgttcctgacaaaggccaagggcgggatggcgatgagggagggtgatcgcagggtcgatgccatgagcgagtgcggactcagtgactgactcgccgggcctgtgaatatgagacggtgtcgacgcgaatcggtcggtatatgatcgaatcgaaagacaatattattacatgcccgcttgatagttgagatgactggtgagcttacgtgcttcgtaccatccatgctcatcgtctgatggatcgaccttttcccgcatttccctgactagctcgagcgagttcagctcgtgttcgagttgctccgaggtctgtatgatgtcatccgtggtgatcatgatcggctgtcgaggtgattctgtggtccttgtatacaacgtctttctgggttgttgggataggtgtaaagcgaggatgaagtcgatgagatgaggtgatatactctgctataggatcgacattgacctcgacctagctaagtctcccgcgacctcggccgtcatgaccgaacatgacgaacacaaaaagttgaacgtctgattgtgaatatacaagtcgacacctctttccgccataacaaatccgttgtcatgcaccatagcaaagagcacacaccatagcacagagtatacatcgttcaagtcataaaagctgcgatggaagccgaagaagaccccgtcgaggcggctcgtagattggccaggaaacgacctcgagaacaactcaattgcagcgaatgctatcgaaggaaacagaaatgcgagcaagtcgatgtttctaccagcgtgagagtgcagccgagcgatccagctaaagctccttgaacactttgcacctctcttagtcgtcaattcccttgcaaccattgtagagcgagaaggatccccgaacgctgcatccctcctcccctagcgaacctctcgccgaaccaaaatcaaggtcacaccgtctcctcgtcgtcatcatccacgcgaaacgacagattggacagggctcgaccttatatccctctaaggacgcccagtctgaccgacacgaaatggtccctcgacctgacggacgggtcggccctcttggccgaattagatcgtctggaacaatcagcggatgtcaggctttacatcgagatgaagacccggctaggtatgctcgaaaagtcgaattccccaagtaggaccgggttctctgtccctggtctttcggcgatgtcgatgatgggacagagggacggaccgcaaggatcagccgttgggtcttgctcgaacagggtcgagacgaggaggaggagcgagccggtgtacaagaccatgggcaacaggcggcagagagatgcggaagagtatctcgctgaaaatgggtacggctagtagttggacacgtcagacgtgacagcttcaaaggatgctgacgtctcatcatctgctgatcaggtacaatggagcttcggcattgggagccttgacgaaagctcctttgctcaacgtcgtaggtcgtactggccctcagtggcaaacaccttatcgagactgaaaccccccacacccctctcctccgttgtcgtctcgtctatagaaacgaggctcgaccggtcccgaatccatttccgaggatcataccttctttcgacatagctcggccagctcgtcactcgacaaattgctcggtctggatcactttaggcaacacgagatttgggatatcttcaaggttctacccacggtcaacgaatgtgaagagttgatcggctcttactttttcaattgggtgggtatagagcaagattctttgatgacctccaggcagctgaacgaccgatacctcgtcgtcgccaggattggacgaggtatccgttaccacctcacgtattcccgccagattggaaagaactcttggacatcgaagcttgcgttacgaggctgtctctgttccctcacgacggttccaagaataggatagcctcgctcgcgctgctctttgcagtgctagccagcggatccatcaccccctccctgctatcctcggatgaccacgctcggtcggcaaacttgttttgggctgccaatcaactgatcaagtactgtgaacatcacgtaccgaacgacgctcatgtcctatgggccaggaccgtcatggtccgcctggccgatgtatgtagaaacacgcaatgcacgtgggaaattgcaggaggtatgataaggaatgcgatagatcagggcttgcaccggtgagctcaagacgtcgaggctcactcgcacatgctggctgatcgtacttttgtgtatagcgacggtgtgggtttcggactgtccgaagccgccattgccgagaggcgtgtcctgtggtcccacattctacatgacggtgagtcgagccgagcccgtgcgctcatcccgtggctaaggaaacgaccttgctagaccgagaatgggctctcgttttgggaagacctctcatgatcacccggtattccactttgatgccatcggaaaaggacttggagcagtttccttacgatgttcggcagtacatcctcgctcggaacgagctgacgccgtgagtaccggttcacccatacatcacgaccttgacccgcgctcactccgcacatttcttctcgacagtctcatgacccgcgtatcagagcttttccaggactttcaggatctggacgggccgatcccgactgcaggcatgtcaccagaaagtcttgcccagcaaaaagacgccacattccaggcattgtttgctatcgacgatgaactcaacgaatatctcaacaaccttccgaacatcttctcggtcaaccccgttcacataaactatgcgacggaaagccggtacccgcggctcaaagtctaccgacaaatcatcataggatcggtctactttattaggatcttgttacatcggccttttatgctcaactccaggcggttcggcgaagcagaaggaccttaccgcacctgttggagacgatgcgtagataccgcaattcgcgatctgcgattgcgcaacatgtggcggttgacgctgtcagagactgagcaagtgagcccccgcgtcgattccattgcgagagcacaggtgcatttctgatcgctgttgtcgcgtgcgcaaactactagacgatgatgtatggaggtgcctgggcagagttcaattcggtcaccgtcttggggatctctctgctcctcagctcggagctaaaggaggacatcgaccccgaactgcagagggaatcgctcgagtacattcagggctgctgtcgccgcttacaaggggatcttgacgccggtaaagacgacgccgtatcgactcgagaacgaaaggttatggatgcgctgctgttgcggctgggatcttgtctacgaaatccagatggatctcgccttgaattgctcgatacgagtaggtcgcgacgtcatctaggaatgttcaatgtagctcacgctgatgtcctgattatagactttgcagaagtcgcggtcgaagtgagcagaaataatgaagctccgcctgcatggctagaagggacctggttcgagggtccggatggacagccttctctactcgacccgttcctgatggagttcttcgtcgacgactggaacatgatgtttaatgcttgatgatcggccttcgtgccctccatacaagcgcattcaatttcacgtaaagtaattcgtaattcatataatgcatcatgtcagtcagttgacctagaatcgagatggcgccattccgctccgaacaacaaagggcgacgagctcgtaaggagctggagagaaaccaggttccatcaaacttggagtcgagtcgttgctgtatacggacagattgacggacggatcaggctgatcgagtcaagttgaggtcggagagacggcccgtagaaagatcgtaaagccagctaggaaaggcgcgggatgagcgagatgtggacgcatgcaaatgtgtcgcgcatatacttacccgtgaacctggacagggacgtcgtccctttccttggccgtcgcccagttcttcttgatcacctaatcatacgtcaaagtcaggtgtgtctcgagtgtcgcggagtatatcgtcacgatggagcgactcaacccacctcagtctcgcaaatctcatcgacgccgcgcttaacgttcgcgacgatcaagtcatccaaagtggatccttccgggagggtgtgacggagtttgatcagaggttggagaaacttcatgagaggggacgtattggcatcgatctaacaagaaggtggggggaggtctcagtgagaatgtcgggtaggatatgtttgtgagaaacttgccgccttgtcatcagactccctcaagctcggaatgttttctcgttggcattgtcgatcaaaagtcgaatcttcagcctcgctcgaagccggcgggtcacttttgaatgctgcggcacaccctccgcaagcgttgtgaccaatcacaacaactatataccacaaacagtgtcgtctcaccaacatccgatcagaaggactacaggatcatcggtacccaccgtgcttgatgccaagatgtctgacaccgtactcaagaactgaatggcaggaatcgtcggccttgcggaaaatgttggcaatgttcctgtgaacaaaaatctctcccggatccttgctgtccaggaccaacgattcggggacgcgactgtccgagcctaacaagcgcgacgttcttatcagcgagggacgaactggcctcaagactggactcacaatcaaaccaaaggatttggggctgttgaccttggctaagcttctcgaacaggccgggatgatcggcctcgaaagaggtcgcccaagcagcattctttgcgatgtgcttgttcaagctgggaagcggaagctcggtggtggtctcggagaaggtgggagcaggcatgttgagcgtttgttcaagggatgtaggctgtatcgagcagatgaaactgggatggagtgtcgataggctcgtcgcattgtcgtcgatgattgaggtatagagcgtcaatatatatagccttttctgcagcttccgcaacaaagagatctctcctgatacaatggtttaggtctgttgcggtagctgaaaatccacccgaagtcaccatgagccggaccgcgaccgacgaccgccataacgaagacgatagcgacagtgacagcagcgacaaggcgatacaatgcagatccatacgactacgagaccatggacccatggaacattcgaccttgatccatctcgtcgcttcgcttgttggcaattatcgcttgtcagcatgcatcgcttgttgtcacgcatcggtcgtcgtcaaaggatagctgatcgtactcgcgcgacaaacgaaaataaggttcgattcggtggatcacaacaatcgaacgggcgagaaggatgtttcagatcgaacagtaatagtgacacggtcgatcgaagcattggtacttctgtcgacgagcaaaaataagctagttcggccgtggagatagcccacggtgcaggtcgttcccaaacttttgggtggagttgccccgtcggttgacacggcgacttctatgctcaccagactcatggccaaaacgcgatcgtcaaggggatggtctgtaccccttcggaagctccagaaaagggctaaaaacacactcttggctctctagttgaacttgagatttcgtctgtccgcggtgtgtgtcatctcgtgctcaccgccgggccatccgcgacccgttcgaaagccgtcgcaatggcaggccaacccagtcaggttgctatggcgattgaagggttttcagaagaatgtcatcaggcttcatcttccctcactgccccgtgtctgaatcacctccagacagagctatcgaaaagacaatcaggcgaccatttgcaaccgattcgcccacgcgcaggattctcccttccataagattgtgtaactcaacaggatctcgagagtcgctgtccagcgctggagcgtcttatcgcgctggatcggtctcaagccgtccaactgtacaagacaaaaacatcgcgatctcttccaatgaaaccttcgaagactcgttccgactgatgcgaaaaagctgaatgctgaagctcgagcgaggccagatctccgagatctacctagacacgacgctaccccggaacatgtagacgtcgtttccttcgtcgaattccaaatagtgtgatgctatccgtcgtcgacttcacccttccatctggtccggctcgttacgtgggctatctcagggagtatgcgacgtcctgcgcaacttcgttctgccggaccatccaagggaagccgcgagactggtgtcggcgcaggggaagatcgaaatggtctccatcgaggcgtgtgaagtcaaggtgtcatctaccaacttggattgtttgacacctcgtcatagggtcgagcaggtggccgcctctggcatatcacgccgctatggagaatgcagtgcaataatggttgcaacacaaaggcctgaagacgggcgaggtcgaccaggatgactttccgatcagacgagctgaaaacatagataatacgacgggattacaaggtcggctgcctaacaggtcctcaatccattgcagcgccgcccacggttctgccctttgcaatccttggggaagacatcttattgcggtataaggttcaattgggaggttctgatggaggagtaaggagaagtggggcaaaggtaggggacattgtgtattcatgaagtacatgcgaaagcgaagccccgtagacgactctatagggtataatgtcacggcgaatccagtcacaagttttttcaggtcccaatcgaataaacgatgtagatgacgctagatgggacaccacgacgtctcagttgcccaaatcttgatatatcctgagctaaagaaagattgactcactaagccgtagtgatcaacgccgccgcgacgaccaagccgaagattgtccagggtcgcttggcagcacgaaggccagatcgacgttcctccggcgattcgacgctttccatctccaaccgggtcttttcgtttgccttcaacacgccaccaaagtaccgcttgtccaagacctgagcgaaaaagggccgaaacgtcaggcatgatgactcgaattgataaaacgtcgaagctcaaccgggacgtacattgtagatcagaccgtagatgatatcgacagccttgagcgcgatcaacaggtagaacacgttgttatactggctggatccggtaggcgtcttatcctggactggatgggatcaagtaaggcgattcagccactgggccgttaccaccgccgaacaaaatcaaaactcactggctccagcagcgacgtccaggatggtggatccggccgagttgaaagccttccatactccgaaagcggttccgatgcaagcttgcgaggggaccagaagaggtatcgaagcgataaaggggatctgtgaggtcgatgatctggtcagagagttctcaggaagccgcgaccttgaagcatgctcactgcattactcgccaaagcaaccgaaccgagaatgacactgacacacgcaacgtcacgtcagtcttgctcgtcaaatccgcgtaatcgacacagactcacggagccatgggatggacattcgaatacgccagcaaggcgaagactaaaacccaaagcgaagcggtaaacgtcacgacgtgcattcgacgaccaaatctgtcgaatccgaggccgatgattggggtgagaacgatagggatgacttgggatagggaagaggtatagccagcggtcaacttggtggtgccacgggtgacttcgacgacctgccaaatcaatcccttggtcaacaatgggtgttcagacgacgggcgaggagaatgctactcgcctcggccaggttcgagttgtatgcgccgacggttccggcttgcaacagctgggacgtggtgaccagccagaatgcggcagggatagcgaacaagctggcgactacggtcttccagtagactttgctaaaagggctcatcaccgacctctcgacgtctttgccgtccatcccctgggctctcgcctgttccctgagcatgagggcgactttgcgacccgtcatgaccctctggttctcaggcaaggtccgttcgtagaccacgtaaccgatgttgagcagcaaggttacggcggcgaggatggctccaacccagaaggtccagaaccatttccccgtcccctgtgcgatgggtacggaggaaagtctaccagcgaggttgaacactcggcccatggcgatgtcgagaccgtagatgaatccaaggataccagctccgcctttgacggtcccgcggcccctacgcacgataaatccaagacgatgcgatttcgaatagtatcagggcggcagcgaagatgagatcaatgaaggacgtctccatcagctctagtatgtgatgctgcgggattccgtgaccaggactgaccagtgggtatagagcttgctttgacacgtctcgatcgtcgtggaacccaagccgaaaatgatctgtccacccaaaatcctgtccgtccggccagatgcaaaccggtcagccttgcctgcctaatcgtacccattcccctccgcacgtgctcacgtcgagaaacttcccgtcgaccctccgatggccctaacgatacatcccaccaacacgcaagtcgacgcgaccaagctcgctcccgaaggaccgtagtaatcgatgacgatccccgtaaggatgggcaagatcccgttgatcaaggcatcggccgaggcgattgtcccgtaccgagcattgttcacgcccgggactttggcacggatggtggatttcaagggggagagggaagagtcggcaaagttggaaccgactatagcagcacgcacggatgcgggtcagcattcgacgctggaccaagtccgaggtatcccgagctggactcacgggtgaggaagatgatacaagccaaagcggggcccttgtacttccaaggtctatccaccccaccagccgtgttgtagggatcaaattcgacctcccctcccgcatccccatgtcctccccccgtggtggtcacggcgccaagcgtgcggcctttctcgtacgccaatccagtggtggtggttgtcgcgtcagcgagggggaactcgggcgttttttcgaggtcggacgaggatttatcttgatcttggtccgaggtggatgatcggcgggatgcgtcccgatagggtcggaaggctgacatgatagtgatgacgatgggcacttcttgaaactggtaaacaatgtataggtggaagatgtcacgtcgcgcacgtcgtttatgatatcacctgccgcgttcagtggtagtgcgaagacgaaatgacgataatgtctcgacatcccgggctcgaccttgtatatatacacccgattatcagatacgacttttggaaaactagggcccccaagccagggcaggttcagggctggtacgccgatcctcgcaattcaccgcacccgatgacctaggtttgggctacgaataagggtggaagctcaaggaagagcgattaaacccgtcccttctgagagcaccagaggttgttcctcggacgagggggcattcgatggttcgtccgccgggaagcatggcatgagcatgtgtgacctcggaacgagtctctgggtgattgccagctaccgcattgacggatctccctcggaaatttcgatcccgagagaataatgaaagtggctttttttaccctcgccaaaggattttcctgtttatcagatagccgataatcgcaggtcgaggcgatacgatcgagagatgcgaaagacaccgacccagaggcgttcctcgcgggacgagaccggcctgatgaaggggtcggcaggcaggccgtttggtcgcgatatactgcgtgggggatgagcggtgcaaagctgaaggaatgccaagccagatttccgagatcaaggttcatcagctaatcaacgcgttgcgcgttaggtggatcccgagacccgaaaggaagagggataagttgatcacgtgattcgatcatcaatccaaagggacgtccaaagcgtgtttcatgtgatcacccaactttcgaccgccgtgccctttcggatcattgttttaccccgcaaaaccgtgtttcggcgagttttcggtgaaatggtcggtgaaatgacgagcgggggaacggttcatcacccttcttataggttgggagaaccttggaggtatatcatcgctgtccgtctatcctcgtagactcgcgctcgcagtcgatacactcctagaacagagcaacactatcgcaacatgtcttcattcggaagcgtgagtttgtgccactgattcctctttcaaatgccgaaccgaggaaaacgaggctgaacttcacattgacaacgggttcattccaggtcgtcaccctcaaagccggtcaaagtgacctctcctgccaggtcatcgagtacgttgaacctatattcgtcgagaggctgactccgcacgaaatcccaatcactgatcgtgtaccgtcccgtctcttcgcgtcgtcgctgccgtgatcagaaagggcctccacgtcttttccatcagtttcaacgacaaggatgggaagaaacaggagatcatcatcgggcctgaagaacccaaggatgcggtcaaagatcgtcgagtgagtccgcacaccacctctatcgtcttctcgtgctacagctggctgatctgcgcaatgctcacgatttcccctccggctctgatcgaaccacgtcatccaccacgaatcctcctcgtcccttgctcatcccgctcgcgagcacctcccagttcctccactcgatcgtaggaaggtactgcaaccgtctcccccactcctcgaccgaacccctgaaattgcccaacgggtccacgttcaccccggagcaattcggtggagaggggacttctctgcacggaggtcccgagtcggcaggatgggatcaaaaggtcttcaagaacgtctccaaggagatgggcacttcgtcctctacttcttcttcgtcgtcctcgtcgtcttcctcatcggagtcggactctgagtcgggttcgtccccgctcttctccaagaaggaacaagcctacctcaaggaaaagatcgacaagggccaagcgggcgtctgggagtatgtcagccctgatggagaaggtggtcatctcggtaaagtcaggacgcagacggctttcgtcctcgaagctgggaacggcgagggagaggtcggcagcgtcgagatcgtctacagggccgagttggtagagggggagatgacggctttgaacatgacgcacgtgagtcctagttcgtggtccatcgagtgacggcggaaggatcgcggtgctgatgaggttcgattgtgggtacgatattagcactgggcattcaacttggagttcagcgatgcagggcgggatggaccttgccccgtcggagacgtcaagaaccataccttgcacttcaaggtcagtcgcgtcgctcagccgcaagtctccctaagctgcggtaccgttgctgatgatgaggttctcacgatcctgtcatcacgatagagcaagaacattctcgacctcgccgagggtaccgcccttcccaccggaaagaccgtcccagcgcctgtttcccgggactttagctcgcccaagaagatcgggcaggatttccccgagggcgggttggatgactattgggtgttcgagaggggttcgggcgagagggaggtcttggaaaaaggggtcaagggggccaacgtctttgctgatatcgaaaagtcagttccggggtcacgtgccaaggggttcgggatttggggaaatggcagatactgatgacctttttgtccttgcgttcatcagggacaaggaggccgtggccgtcctctcgtctgacaagaacaacatcagcctcaactttaccaccaaccgtaagctttcgactcggcactgtcgaatttacacgcttgagcgctgacacacacgtcggccctgagcagaacccggtgtccaagcgtggtcaggtactggtggatacgacggtcaagattcgaggcgaaagattcacggtggcaaggccgtcgagaaccaggacgacgggtacaaggttccccccgcgttcgccatggaattccactcgggtgagtttgcatcagacgtcgaggacgagtcgtcaagtgctgatcacaaacgtcccgcttggatcgccagtctacgacgcctggatgcaccccgagttgaaaaagctcggttgggacaccgtcctcaagaagggacaagtttacaacaactgggtcaggatgaacatcaagtcccagtgatccgtattgtagaatatagtctcggaaacgtcatgcggattacaatgtgattgtttggaaaccccacgactcgatcactgatcaaacatctcgggcagaagccagtccgctgcccagccttgatcgagcacggtacccggcttgaactttctccccgccctatcctcgctgcgaaacgcaaacgccgagccaaggatgtcaatttcgatccggggtatccgagcaagcgaggtctcgaaagcttgatgtcggttcgaggcggtggacaagatagagtcggtcgacacgggctccgtgagaaaggcgagcgggtcgctcggatcgatcggttccagtgggggtagggtttcttgtagctctaggcctgcatttggaacgtgcggcagcgtctggaagctgtatgcggggaaggacaagaggaagagggtgttgcctttgggtatgactagaagcgttggcatgcagggtcaatcacctgcacgtccgttgaatgatgttagggttatgatcacttaccccgaacgattccatctttcggcacgatcttgaaagtaccagccgtttcctgaacgactaaaccctccagcccgtgcaatgcctcgttcttggaccgtttcactggcaatcgtgtgccggtatcagcgagactctcaatgtaaaatcatagacgagctccgacagacctcgcaagatggcccccgtcatgtcagacttgacgatccgagcgctgatcagctcgcaccccagtccatttggcaatcgagacgcaggtagcgggccatgaccggcagttgaggacgaggtcgaagcttgccgggagacgaggtcttcctggtaagacggcagtgacaagagctcggataggtacgaaagatagagataatgtaggggaagcagcaggttgtagctagcgacaaaggtccgggtcagtacctctcgtcctctcccgagccgaccactctcgactcacgaaatcttgacaccagcttcgaggtcccatgcctttctattctctttacgattccccagaccgatccgttttcgcttcagtccccgctcatcgtccttgtccaatttctccacctcttctttcgtggccaaggctctcctcttcttgcccttgttcaccgcatgctgtttgctctcggcttcttgcgaggcagggccactcaatggaggatcttgcaagatcagcgatttgttggcgagacggccgttatagtgctgcggcttgatcttcaagagggaacagctagcgggcgagggaaggactgtagggaaagggtttgcggccgaaaattccaacagcggtttctacgagccgttcgagagcatgtcagatcgtcgtcctagagctatcgctagttgccttgtgcggagggacttgccttgaaagaacctggtaaagcccgatatggatccagttcttgatgagcgttcacctcgcccttgagcggggcgaagactccgcctttattgcccttgccgactgatgacattaatcgagttgtatgaagtcaacctcggagcaggttcgagaaggcgaaacacttttgcactgccttgaatatcgtaggcggtgatctggtccgactgcgtcgatgttgtagggcggtatagtagggactgccgctccggtaccaaaagtgaaaggtccgcggtgatacgcccgctacggaacctcgaagtcgacgatttgataatgattgtgattatgtggacaacttggtgaagtaggtagcaggtaggcgtcgctctagatgaatatatgtaacacctgttgcagatatggctctttcgatatccgacattcgctttttttcaacgtgccgcaaccgtgaacgaagccactgtctgtcgactctttgatcggcctaaggggtttcttcagtcggagtgacagatacatatgaagcaggaattggcaagacacaaagactcatcgtcacccggttactttggctttgctgccgcgattgggtcacctaacaggtaaaaactgactatgtacaataatcctggactctttctctaatcagtacatgcagagaaacaaggcggggccgatcaagactatacatggactctggcttagggctgggacgtacgtcacgtttggttttgaaaaccgcctagatacggctcgatcttttcgctgagagttgcgctgagggtcgagtgcggcacgtaagtctcctgatgtcgatggggccgacttttcccagtcgattcatctcgtcaagtagtactccggtgatctcactgatctccggtcattcgctgcaatgcaaatacgagactcggcaagagcgcgtctttccaccaggtattgccttggggccattcgggcgacagaggcaatttttccgcctcggcatgcctcatccccggacattccacgaggagagcgtcgatccccaactccttgactcggtcgtacagacgaccgaattgttcagtgggtatgagcccgtcttcggtcgcagatacaacgcaagtcggaggaaagttccgtgagatgagattgattggctctgccaattctgagtaaggtcgatcggtaccggctaggaacgaacagatgcttttgttctgacacggccggatcgaggtcaagaaattagtgtcgcactgggcagcaatccggtcgtctacaccgagacccactttgaatgcccatatgcatctagggttctcgcgatccatttccgtctctgctccttcgttcccgctagaaatctcgatgatcctatgaccgtgggcattacatcagtaagaccataggcggacgctcacggaagatgcactcaccgaggccaatactcgtcgggcatttcgtaagacgtggaacactgctgttcgtcgattctttgaacgctccgggccaaaagagacgaggcctttgcggcttcgtcgaatgtgcttctagattcgttgagcacatcgaacgagatgagagggtacgtcggaatgatcgccttcagagcaggaagctctgaggcttgattggaacgctcgttgtgcagctcgattgcactggcctatgacagtaagaaacggtcttaattggaggtcacttcgacatgattatacgtcccgtgagactcacaaggtacaccgaattgctggcaccggcagaccaaccaaaagcggcagcccgggatccatccacgacaatgccgcttcctgccgccgcgagatcgcagttgaggccttgctggacgtatttgtacgagtcgagcaggtcctcctgaatctccttcagcgcaacgctgagagaataaggtacactgaataccgtgtcatgttttgtggggtaattcagtacgactcactgaggtataaggcggtggtcaaaggagactacgactatctccttgtccaagaggtatctggcttggtagtatggtatttgtaggctcgatccgagggcccacgcacctccatgatagaagctgtgatgtacatcatcgcagcatcagtccaccgggccgtgttcactgcattcaggcgtcggtgtcactcttacagcgcgatcggcaaccctcggctggaggaccttccgacggtcttgggtaaccaaacgctcgcgttacaacctccgccctgagtgttttcgaggggtttaaagaggaaccgatggtcgggcgccaaccttgacgaatccggcatcggttcgtcgatgtcgtccgacagaccatcgtagaccgtcctttcgaatcggttgtacagccgataaaactcgtgcggcacagcgcataaaatgttcgtcatacagattccctttatccgattggtcgatggcagagtcagcagagatattcggatactcaagcagtcttgtgagttagtgctcaccgctaatcccgtcttggggtccaaccagtacatcgttctcgcgacgccatcccagccaccgctacctgcctttcgaccgtagatcgagtcgacaaagttgatcgccagacccacactttgcgatatctttctaggttcactcggagcgagctcgaagaacgagggatcgtggaacgtatgactcttgagggtatcgaacatatgatcgtggtccccatccgattgtaaagagtccttgaacaactcttcaaacgattcgcgggacaagatggtcgtcttgtcgtctcccgaacgactcgccaagattgccctgagaaaggccaggtaatcctttgccgtcgagaatagccccgcaccaccgctgagaacaggtccggccttttccggatcgctttccctcgtcaacggccccagttccgcgaaattatctggactagctttgatagggctgtccgccgactcttggacggtcagcctcatcaaccgttgtttcgtctcgtccgtggggtaaaaggtcgcgctcttcatcccagccttgtcaaagatctcctccttgtagtgatcttcgagcgatttgccggtcaaacgactgatcaatattcccacccagtcgagaccgaccccgtacacccaagcgctgccggggttgaacaggagtgggtagaggaagcttgcctcggttgccccgcgatcgaggtattgcgtatcgacaccttgacgttcggcccatttggtcaggattggacttcggttgacatacgataaccctgccacatcagcgtttaacgtcagctgaacgggtcgagaccggtttcttgcttccagcgtaactcaccggacgtatggctcagtaacatcctcaaggtgattttcgtcgtcggatcttcccattccggctcgtccttctcatcgtaccctctcaggatgcggagagtcgccaattcaggcagatgcgtctcgatcagggcggtgtcgtcgagagagactagtccacggtcgacgagttgcaaagcggccacctgtacctcatttcggatcagttcaccgagattgactaacaaggcaaccgaaaggacatacggtcgtgaccaatttggtcgccgagaattgttggagtactgtcgattacggcgattgaggtcagtccatcgtgatcccgtcaatggctttcggcgtggccagctagctcaccagtattctcatctacagcaggcccgtcgggatggtcgaaatcaacgggtccattagagttccagtaaatgatctctttcgagtttgtcaatccgaaaaatgtagcgggtacttgacgagatccgactgatccctcgagtagcttgtcgagggcactaatcccagcagcagtcaatgacgggggacagaccatcctatccgacgtattgtgcagctatgttcgattcccgtcgtgttcagagccgtaattcatgatgataatatctcgacaagtcgatgttgcctgtttgatcaattgatcaggttgatgtgttgatggatataccttgaatatgcccagagtaaggttttgatgacgacttcctttgatcgtctggattcgacctgacgaaggacccatcttgatattcaacccgtcaatccgtcgttatgtagggatacaacccttgatgccacgttaaggtatgcctttataaggtcagatcttccgaagctatagccatcagtagtagtcttagtgtgatcgtcagtgatttgaaagatatgattcatcatcctagatcatcctaatcggcaccggaagccactctgacagaattcatggccgacccgcgcatttgtgatgcgccgtttgcagcaacttcggacttttcatgcacttgccttgggtttcgggtcatctcatatgtttgcagtcatatattctcctgcaggtgagcttacgccatcggaaacacgatctccccctcataacaagtaatggtttccgactggggtatggcgaaccttcttgatctttcctcatcacaacgacatgagcggggttatccggcgcatttatcagacctgcaatcgactcggactgctttcattcccgcactcgcagccgactactcgcatatcgggaccaacacttagcaatcttggttgccaagttccataactgatgcgttacttgtgattcgctcgagtcgaatttctccacatatacaggtccgcggaagacaaatatagcggtggtcaatataatgaggcatgggacagcgggatgtcttatggtcagcgaggagggcatcagtcactatcgtatcaccatgaaattccgatcgaatagcagttctatagatacatgcatttccttgcctttcccccacttcatccgctcgtcgtcctcaaactttctgctgcaacgtcgacaggtagtcttgacggtaagggttcttgtcgacctcctccgatcgcgagtaggggacccatttgggctcgtcctgaagagccaccccgattcgaaaaagtcagattcggtcggctcaacgactacaggcagtgtcctaggactgaccttgaacagacggagagcttgcaccttgtccttctcgtccagggtgaatcgatggtagattctgcaaagatccgccaggcgtgagagaggcacatttgtcattcaccccgtccaccctgtggatgcaacctcgcatgaactcacccagcgggaacgacgagtaagtcgccctgttcaacatgaatcctgatccatttggcatccgagtgatctgctccaccgccagcgaagacgttgctcgtaagccccgacccggaccgtcattacccaagtggatcgagcatgtcctgagcggactcaccgcgaacgtcaaagaacccgctcccatccaagatgtaccgaatctcctcgtcctcgtgcaagtgttcctcgaagaacgatttgagcttggtctcgtaggcttctcctagaccttcacgggtgacgaggatttggtctcgctaagcggtgtgttgatggcacgaggcaggtcaagggtagcgagtaggcggatcgatagatggtcgaggatagagctatcgtcagtttgcggactctgtgttgatatgtgctagtccggacctacgtttttgtagtccctctcctttgccagagcgtctgtgcgagtatcccgaagtacacaaccatgatatcagacgagaatcccgaggagcctgatgatcgcccatgctgaccaatgttctgctcccacttgtcatcgtgagggatgttccagtaaaggacgccgatatctttcagctgcccgaccgacacggcattaccggaatcgtgagctagacgttggtcgcctctgcaaatgggtccaaagacgatgagaactatttttttcaagcgggcttgacggcgaaagagtctcagacttgcgggatgtcgtcatagatgtaagaacgcatggcactattttgatactcgttgagtgccgggctttaactggactgagtcgtatgctcaaggctcgtcccgtaatttagaggcgtcttgattatggtcctaagcacgagatgttctagtgaggtattgacgtcgccgtccgtcgacccggccgaggtcgaatgcacgcacggaagcttcgcgcaacgactgttcccgataggcaatctcttcgagaccaccaacaataatcaggcatagatcatagtctacctgctacctgcatcaaaagctctctgtctgagcataatatataatagctcttgtcatgctttcgatccggtgagcatcaattaagggagtcgattgggtgcaagaccttgatgaacgatgtgctggtaccgcgctgattgagccttgtcatgaaaaataagtagatcaaatgctcagcagaaggcaggcaattatcaggactttcagggcgctgagaagtcttgccatcgaggacttgcagccggaaataaatgcgctttccaagccgccactagccgcttcattttcgggggaaagatgttggccatgagcccgagtagctcctcattgtcatcggggaccaccccctcgttatgaggcacctgcagatccttgtcatgaggcaccttcttgaagaagagcgggagctgcaggtcgtgttgcttgcccaaagccacgctggctcgtaggacggcagccaggtggtcaatccgattattctaccccggtagttgtctattaccgttcaggtcgataggcagcatctgcagatagctcggtggaccattacgccagaccgtcccccaggccgctctccagacaaatcatgtgatagactccaaggagaagtcttgggagatttcccgggaccagacatctagaacgctagaggcatatcacactgcccaggtagatgtagtaaagctagtgctgtatctgttatacaatcctaggcatgctacttctttgcacaatgcacaggaatagaatccaggaatgttcgtgtcctgtggatcgtcttgtgatactttctatcaagcaatgatgatctctggcacatgattgttaccttacggataggtcaagaagtgttctaaaagattgtgtcaagattgatttgactgccacccaggccacccaggggccgaccgaccgtacacgtcatacctaaaccgggcggaatatatttcagctcgctcgggtccgactaccccgttcaaccttgaacatgccgatcagcaagcttttcgttcaggtttcgtgatgatagcttggtagcatgacagagtggtcgactatgaatgcgatcatgtactcaaaatctcattgatatagcaatccttacgaatcctctgccggaacgcggctttgtcggacgttacgctcgattatggactatccaagcttttcgtacgagcagcaatcgtcacatgatagatcgattagggccccggcccagacgtgtgcaggtcagtgcgacaggccactcgtcggagcaatctggtcattgctcatacggccgtattgtatggattatcgaatagaatgtcgtcgtcgcaagtcagtcccgatgtgaacaacgcggacccgcacggccaaacaccgatcctgctactgtgtgcgatgcctgtcctgatcatctggtattccggatcttttagagccaagtgtgataggtgagtggattttgacaccaaacttattcatacatcctggaaactgattcagccttcccttccgctccgcctagaaagacaccatgttcaggttgcatcctgcggggtctggaggaattctgcggtgacccaagtagggtcgcagcagcggacccctcgtaagcaagcattcgccttcaaatggacgtagtcatatccagagctcacaacacctatctcggccacaaagaggctacaccaaactcgcagactttgataagctggtgcaacgcagtcgtctgaccgaagagactctgaccagtcggatcctccagttggaaaggcaaatggctagatttcgcgaagaagaacgacgctgttccgtctcgtcacctctctatccagccgaggccatgtctaacttcgaagttcatacgcgaactgaccgtaccgcatcgacttcgcccatagtcgttgaagggctttcagcgaactctgtcgagcagacttacgaggatcgatcaacttctagatctggacgagcgggttcgcataggccttatctgactggccagacggcagacaatcagagtcaccaagcagcgttgtttctggaggacatggctatggaccggatggagaacgttgagcgggatacctctttgttccgaccaggtatggcttatgatccgtccgatggcctcgtggcgattgcttaatcccgccttttctgcttcataggacttcgtgaggcctacggtccctcttcgaaaggtgctcgcaatgtacgtatacccggattgagcggtctgccagatgtgcagcttggaaacgatatcgtagaacactttgtaagcatcacagctgccggcgagaccccatgtctttctctgaatatcgttgaaacgttccgtcatcgcccagcttgtcaagtgagtgaacctatttctgcgagttctgctagatgctgattctagctactttcagtttagagtggatgtgagtcttccaaggtgtgactgatacttggcctcaaagctgacaaggtgaccgaggtaccttcaggttcaagtgcttcgaaatttccatgttcagacgaagattggataggctctcggcagggccaacctgcaccgttgtccccgtcgacgatgtcccgttcatcagcctttattgcgcgatcctctgcacttcgctccacttaatggagccagcgcagctgagctcgataggcatgactggagacgagcgagatagggcgacttcgacgtacagtatgctcatgggggaatgttggatttttagcgacatgtcgcaattgcaaaagattgagcatatacagtcttatgtgtaagatccagacgtttttatgccctcactcaatttagctgagcgtgtcgtctttctacaggatcattggaccgtactggcatagtataggtcgctcggaagctcactggtctgaccttggcctgatgatcaaggtgacttcgctttaaactcgccttatgggatcgaagctgatcactgtgggtgcggtacagatggcacagaatctcggactttccagtctagtgtgtgagaaagactatgagatgcggcgggtaccgagcggatccactaggcactcgcgatggaattcgaagcgtcagcgcgagatcgggagacgcttgtggtggaccctcgtgagtacccttaccccgtcatgggcgagcacgatacgtgacgattgctcatcctcgactcctttatcaggtcgagcttgactgcttgttcgctgcagaacatcatttcagcgcaatcacattcccacgcttcgaacgtacagcattgcccatgaacattgacgatcgggaactacaagatgacggacccgctacaccgcgtgatcgcgctgtccacacggtgagacgacatttcgcctgtccagtcggcctgtgcaaacctgacgtctcgacacaggatatgtcgttcttcctcgcaagaatcagctggatcatcccgattcggaagatgatcgaagaggtacacgaagagggcgaattagagtatcgcatggtccaaaagtgaggttctatcgatcccccacctctcacttcgatttgaacccttacatggccgctgacctgcgcccgaatctagggcacacaattctctcatagagatggtggaagacgaagtcccattctacaactatcgaaatacccagtgggccatctcggcgcgagatccatttctgttgcagaatgtcctaagggaacgagcgtacctttttcagtacgggcatctcaggctcctacggatccatacaatgtatttgtctcgagctgctccgggatcgtgagtgctcggcccttcgggaacgaaaggctggtcagacagctgagtgatcgcgtcaatcccgctgcgggaccaacagagtctacgacttgagcagaaggaccagcctacgagcagcggactacatcctccgctgtcatacagccatgacagaagtcgggttgtctcgattgtggtgagcgtcccgcccagctacagagccatctccactcgcgtaaggctgaccgctatgcactgggtcatcaggctctaccattacggcgttttgacggcgaccatcacgtcattcttcttcaacatgtacaagagtgacgggcctgacagctacgattccttggcattgttccggttgggcgtcgaagttttaaggcaagtccgatgggatatcgcgaccaaagacgaggggtctccttccgctcaatccggctgacatcacgatgaatagggatctacaaggatcagagaatgttgcgcgggcctcggatgtgtttcacttgcttctaagtgagcacactttatgagaagcagtagccaacaggctgcgatatgctttactgacgagacaccgccatagctgacttgcaagcgaacaagcatcctgaagactataggacgggccagaagcgggcccggtcagacgatacagctgagctgaatgaactgcatgtcgtggaaatgataagaaaggctgctgtgagaatgtcctgctttcgacttgatagctctttgaaaagtgatctccaacgttttcccttcacagcaccaatcgttccgatacaaagaccatatacgggcagcggagcgaaccgacgaaatcggcaacggactgatagagtcgcgggaaggagctggcacggaacgcaacgacgccgatcacgctgaccagactacccctatgtctacccaagcgacaactatcgatcttcaatccgccagcctcgcgcaagatgacatcttccagttgttcgatcagaatctacctttcgattgggatctgtttgtaccgaccgatccctgatgaatgctatacggcacgtctatacaaatggcaagatgagcctgctcggatattcaggcccaaagtggacgttatgcaggcccttatttcgctgagagcccttgtcatcgtgttccacaccttcgaattcctggaacaacgggtaaccaccggagatgtccacgcgcagcgattcgccagcggcgtactcggcacccatggcccagattccgatctccatctcgacaatctggcccggagatatcttttcgatcttgtcgtggggatgatacggatattggggatgcatagatcggctcgcatcgatggcgcgatgactggcccgcaagagtcccatgaatccaacgccaaacagcaagttggaatgatccttcgggtctgtcttttcaaagctctccgccttggcggccgaccaggggatgttgagcgcaaccatggttttcccttccttgtccagctttcggatagtgacatagacgaccatatcgtcggaatcctcgcaagacatgaacaggacggctttcggcatcccgaccaagcgcgtcgtctcctggaacgtgtgtgtgaaactggcgatttgcgactgtttctcagagtcataagccattttccctttcacttgtgcgggatcgaccgatagtctgttattttcggtcaagtacagagatttgtactccgtacggggaagtggatagtcctcctcggggatgtcatagtatgggtcctccagaccgtatcgtagaacggtggtccggaccttgggggtcttttcgacaaacccattgtcgagacctttcaggtagtggtcgaaaaacgcggcgagttcgtcggatgaatcgggacatgcccatagatcgtaccattcttgccacgggttgatcttgagccacttgggtacgtcggccgggatttccatgtagcctcttatgctccccatcgtgtggacaaagctggcgtacgaggccgtgatcaaggccggggtacgaatcttgctaaagtcgacccgcttatcttcccagtaagcgttagtcagagggctccgacgatacatttcgtgaaagtcttcgacgccaccgtggccccggatcatctgcttgatgatccaatcgaatagaccggaatcgaaggttcctcccctgacgaactgttctcgatagagatcgctgcaagcctcccatggtgcaattgcccggagggatgggggattctgactggcgatatgccattgtacgatagcgaggtgggagttaccagcaaggcctacttttccggtcgaccaagggagcttggcgagggcttcgatgacgtctgcaccatcttctccttcctattcgacaagacgacgcaatgtaaacagcgtcagtatcgcacgtcgagaaaaagacgacacatgctttgaggtccggaagacttgcacaacactcacttgctgacccataatgacaacatcaccgtctgaatttcctgagcctcgggcatcgacattgacgacggcgtaaccccgcggcacaaattcggcaggatcgggaccttcaaaacgctcgagcccactcagtgtatcttgcggtatcccgagaccccagggcaagtgagcgaggaccctgagtcctgaagagctctttccaaagggcgaccagcatacgatgatgggtaccggctcgtcatcgctcgtcgcgggacgataaacatcgtaataaaggcgacagccgtcccggacgactacctcgacgttacgttcgaccagaatgtcgcagtcgaggctacgcgcattgttaccattccaaccttttggcagtacttctttggaatattccccgccggtccagccgacctcgccaacgaccggatgctgcagaggcgtgtaagctatctgaacgggaggaggcatgtcgtaaagtcaacggctatttctgagtttaatagcgtttcatatggcatctcgaaccttgactctatgcgaaggagctgatcggcaccatcccgtgttatataaacagcgatgtatcactcacgtcacaagcgaagacgatgtactcacctcaaacaaagccatcctcgcgacacgtgatctggcgcggaattcgcggattttcggtgatcggcgatcgaaattcggatctccccggaccgggccgcggcgatccgcggccgcggggtgtcgggacgaaaccgatcgtcgaccttgaaactcggaatggaatgaggaactatcggatgcggcaaggtagttggcccaaatgcatggaaccaatgtgattgaaggtataagactatgctcataatcatatgtcggggagccaatccggtagacaataatggcttctggaactgaccccgaaccaccttaacaatcaaacctcacccgccgatatcatgcccatcgccgtcaacgaacaacagaagcctgccaagaaggagttcctctcccacgtgagagacattcaagcttctcatgctctcgacttctccaatacctacggcgattggagggatgatcttatccgagacggctacgcggtcatccccgtcatgtccaagaacaaagccgccgaatatgtagagcgcgctcatgattttctcgagtcggtgtgagtgacagcctccaacaagcaataatcaattggagacagaagctcattcacgaaacagcaacctcggctacaatcgcaacgatcccacgaccgttcgcgccgaatgtctccccgccatctccgagaaaggcagtaagcctgcgtggcgtgtcgcgcatcgcgtcggaaacacgaacgctgattgtgcatgatatcgatcacctggctgtagtgattcaacattacggaatctcccacgaggatttcatctggcagcttcgacaggaaccggggattatcgacgtgtttgaaaaagtatggggaaccgaggacctcatttgcagcttcgacgcgttcaattgcacgttcccaaagtgagtcaccgatgcgatgttcatacggctctcgccatcctggctgatacagagatacatagccgcaaggatgtcggtccgaacgtaccttgggctcatcaagatcaggatccggacaggccgggcttgagatgtctgcaaggactggtcaacctccttccgaatggacctgaagatgggggattgatcatcgcgaaaggtgcacatgtcgccagcgaagaattccacgccgagtttgcgcaggaagagagaatgtgggcttggtatgtacctcctcctgatccgatcggcggggttcgacatctccaactcgctgactcggttctattcggtcgatccaggaccaacgagttttacggttacaaagagacgggtctcgactggctcagagaaaaaggatacgatttcgtcaaagtgacagcggaacccggtaggtatcaaggtccctatgagaggaacgttggttgaaacgccactgatctccagcaacctcgatcgtacaggcgaattgatcgtttgggacagccgcaccccgcattacaattgctcgccaaccagcagtcaaacgaggatggccgcctacatctgcatgatgccagcatccagtgctactcaggaagagctgatcaacaagaaacggcttttcgaaggcgagtctgttgcacggtcaaccgacacaggccgggccaagctaacacatcacctgacaacttgcagagtacaaaggcacgactcactggcctcaggcggtccaggaattcgttctaccttgtctccgcgatggcaaacctgatccacacaaccgcagggagccttccgtcaagccgaacctttcggaacgcggtttgaagctcaccggcattccctatatcaagactggatctgtctaattttgatgacaggtttcgtatgggatttccggccaatcaaagatcacagcctgtatgtttgagacctgtttgttgtgattggtatcaatatgtagaaaaaatcgaatactatgctgcacgaccttacgagacgaacttcggccccttgcggcgggaggccaagaagcatcaatttctactgtaggagctagaacagaagggaagtatgctcagatgacgttgctctatagtactaattgttgaatcttccttggcatcgttgcttatccacagacgttgaagaaaagagctgaaagtgtataagctctgaaatctgccactggattgattcattgtgcggtgaaaagtaggagtaaactacctcaatttggaaaacaagtcacatgtgctcgatcgtgatgtcgttcgctcactaggtcactcattcgctatttcacttaccttgcgtctcccttgccaattctctcccgtcgtagaagtgccttttgtacctcggggtccgtctgtacgtaattttgcggatcgtcctggcctgtagagaggtatccttacatgaagggttcaggtcctgtagtcaagatctttgtcacagctctaaagcgtcgcttcacaaccatctgcttgcacgacatggtcacatggatggaagccgtggcctcatagcgcttgtcatcactctgaatccaacagttgacaacaacgccgttattcacgcgggttaaccgctttatcacgagagacgagatcggtatgaaatcgaacagcataagaattcactatcaacgggatgcatacaacggtatgatgtgtatacccattacattacagcaagattcacgatcgacagggtaggcctggtcctttggtggtcggtcagacccacgcgagtctactcgtgacgatgttcgcggtgttcagtcgaacccttgtcgtcttgcttctccagcgacgaatcgaagaattccaaaccttcttcttgatgcccatcggcacctgggaccactttggtcaatggcgcatctacgctccagttcatgcgtcctttcgggttcttaaagaagcacgtagctactattgcaatcacgactagagtgttgtctagctggatcagcgaattgtctctatgaatacatctggctgtggagcagaacttacctgcgggtatggagctcaaccagatgatacggaaagctctagcttgcaccttcttggcggcagctgtagcagctgcaagtataggaccactcgctcccggtactgcaccaataccttgaccagataagagcgctccgatgagctgtcccaggttcgcaggatcgaaacccagaggcaaaaccgatgcagctggaggttggtcgtgaacagtcagtcacttggttgtctttaaaaaagtgtcacacgtgcatgaacttaccgatcgcagcgggaaccttatcgttggtttgggatccatagaccgcctcggcaatggcataacccaccgttcctccgagtgttcgcgctgagattgtcaatgcggtagtgatcccgatgaataatggtggcgtcgagagttgaacgagcgaaaccacaaagatcaaaggggcagtgaaaccgatacctgccagagtgatactaaagaggcgccgatatgtcttagatggataaaagtgaatgttgttccggatgcagaactcactatcccaagacagccttcttcgaattctcggtagctgtacccagaccgatggtcgccgcgaggaaaaacacgaacccagctgcaatgggccatttgacgtctctatacctgacgacataagcggatatgacgggagagatgaagagggtggccagaaagaatggaatgatgtagcaaccgaggaccaaagtgtctttcgtataaagcgtgatgacttgggaagactggatagacagaaattaaagaaagatcagctttgctgcccaggtaggtcgggtagtggagtcgacttgcccagatgttgttaatgagataaaataaagccccttcaactgcgatcaggactacggcaatagggaaattgggtccatgtcggaacagttcgctgtgccacgagccgcaagattcagttctcagatcggcggaccttttctcggctcttcgatcttactgatgaatgaagccgtcgtcgcggcctttccattcgtataaaagacacgctgtgaaaccgacggtacccgccgctacacaaccataggcgtgagggtccttccaaccgaagtcacctgcgtcagatgcaggcacgcgtcagatacttacacgctgacaagtcctttctcatgaacttacggttgctagcccaagcaaagcccataaggaaaggtaccaatccagcaaagagcaggaaatacccgatctgcgatgtgacaaagatggtgagtctcacaggcagcatttgtatatggatgctcgctcacccaatcgagcgatttgaagcgtgcccacagagacgatggggcaggcgctctcgcaggtggctacagcgtggtcgtggggtcaatatgtgtacttgcactgatgctcataaagaacccgtacagactcacaatgtagaagaagaacagcccaacaacaacgatgacatttccgatcaacgtagatcggaaaatccatcgccaaccgttgacgggatcgatcgacgttgccgctcctgatatcgagaagatacggtagcaataagagtaagcctcgagcgacagccgtttacgctcgacgaagcggctagtatgaaaccagagtctcggtacatacccataccgatcaccgcagtcacggctgagaaagacgcccccactccaagagcagtttggacccagcctcgataacggccagccacgatctatcccggtaacaaaagggtcagctgacgtctagctacgaaacggtcgcccccgaagcgaaaggctagtggctttctgacttgcctcagagggtatcgcatagatgattgctgaaacaccatacgccacgcccatgagcgtttgagagacgagaatcaagttcatctgtcggcgggcgtcgaaaatttcatcgcaaagtaagctcctcactttgagaggttgggctatctcgcacacttacgctgctggtggtcatggaaatgatgttggcgacgatcatgagcaagaatgcggggatgacactagatggtcgcatagtcaagtaagcaggaaactcgatgagacaagcaagcgggtcaacccaattgagccgggctgacttacacccaacgacgaccatagagatcgctgataatcgccatgatcggtccggtcacgatggaaggaataccttgctgtaatacgagcgggagcctatcagtcagtggaaagataactcgatgcggtgtagcctgggaggattgttgctcacgcattgagcgatccacatgcgtttgtccatcccgttcaatgggccagcgatagcatagctgttggcggggggagcgatgctgatagcccaattcaagatattcggaattggtcttaatattatagatcccagcattgccgtatagcaacaggtatatcgtcgggaacttacgcgtagaactggaaagaagcgcatcggaccgtcagaatgcgcgcaatttactccatactgagcggacgttttgcgtcgaaccgatccgactcacagtcagattgtactgcgctaccgcgcagaggacgatgatgaaccaagtcctggcagaaataggctctttgctggctgcttcatcattgtctgccgcatcttccaaacttggaaccaattgcgccggagcggactcggtaccgagagtgtttggcgcgatgttcttgccggtggtagtcgcggtagtcatgatcgatatggcacgcgcgtgatgggccgaggatcgtcgtcctgtccatgaatgtacctgctcgagtgacagcctatcgaatcgttcttatgtcatcgatttccacactcagagccgctgtcagtccttcctgaccaagactgtagcggatcggaatgcggggacccgctcggtctcacggacgacactgtgtctgctcgacattgtagactccccggccgcgggcctcgggatcccgcgggatggtcccgcggcctcagacgcaccgaggactccggatctctgcgatcgctgcaggctgcaggacgtgctctcttttggtgcaaaacatgtcgacagccttgatcttaagaaggttcttgtgatgtcctagcagtgccaggtctacagatagcacgtagctgtacaagtttgtagagtagtatcgaccagccggtcccgagcacgatcgaccctattctcagcgcgacaaaccacctgcaccccttgatcacgtttgaaatgcatccgtccagctcggcatcgccccagtggcgtaaaggcaaacgtatagccatcgtgggtggaggacctggggccatctccaccgccattgcctttatccagagaggcttcgacgtcagggtctacgagagacagccggaatgtaaagcgatcggtggagctgtcctgctcagcacgcccgtcttggccatcttccggtcgtacggtatggatatcaagaacctgggttcctttacgcggacacacttcaagaacaaggcgggcgacgaccgggtgatcctgcctttcaacgcagagatcgaacgcaagatggggatcaagggttggcactatggcgtcttgcgctcgtctgttttcaaaagtatgctcgattgcgtaccgtcaggggtcatctatccgggtcacgaattcgtcggctttgacgaacgggacgacggcgaggtccacttgcgctttgccaacggcgccagtgagacggccgatatcctcgtcggcgcggatggcatcaggtcgcgcgtatcaaggcaactgtttggagatcccaatctgttccatactggcatccgcctgtggttggcgtggtgcgatcacatggaagacgtgccgccgaactttggctacatctctcacgactggcagtaccaagccagcttcttccccatgctgcacgacggtaaacccgggttcgaatggtggatcgtcgagccgtcttgggaaggcaaacctataccggacgatcccaaggctcacgtccagtccatcctaaaggactgggctcagcctatgccgcgtttcgtggaacggaccaatttcgatacgcaggtctttcggtgggagatttacaaccggccgtccttgaagaaatggtccaaaggtcgcgcagtctgcgtgggtgacgctgttcatccggtatcgccctatgctgcctatggaatggggatggcgatcgaggacggctactatctggcaaaattcctggaaggtgtcgacttgaccgatctcgacgcggtcacgaggtcatacgagcgctacgaaaagcaacgcgtggatttcgtcaaccacaacatggaattcgcccgacggctcgggtacatattccacaagctaccttatccgctcgccaagattcgcgatctgatcttcgactggacacccttcttgccccactttctcggcaagggttacttggaaaagtcggagcaggagacggcagggatggtagagctacaggtagcggcttgacgcggttcacgagccgccgccggtgacacgaagcgcatgacaccaaggacctcggattgtgatctggttgcaactgtacagtagtaatgatgcagtgtactgcaattgacgtgatcgtaagcgctgcctgtggaagaaataaatcgtgcactttgaacgactgcgaggactcggtgttcgaagaaaacgtgtattagtcctgggccggacgttcgcaggctagggcgatcgatagctagataggcgatgggttctgcccaacacgaaacttgcagcgaatccggctgattcgggagacccccttcaaaatgtccatatctcctgttcttcgaggacctagtgcgacagtagacctttctaaggatagcattcgtgattgcacagacgggcgcgtgatattcgggtaacaacacagcttttcgcatatgtcgcgacacaataccattcagtttatgatttttcctcgatatatttgatcaagatatcaagatgcaaggtgtcaagaaccctgaccagaagatgaatgaaattcggttcaaggtcctcacggtcaatggtatcgtaggcagacgtccgggaaccatattgcgaatcgattggtacgaaccagaaagctcctaaacttgtccgcttgtccagccgttactctctgtagtaataggtcggccgagcaacttcgcgaccctccataggtatcacttacgatgccgtcgtctaggttcgatcttggaagtcatccgaggctcgccgtattgacatcgtcttcaccggcaaaggccgatattttgtcaagctgatcccgatatccaaattcgtcatacacatttacagcctcgactcggaatggcagtaagccgaatagcacacttgcatacgagaagagaggacgcttcaaagcctggcgtcgttgtgagcgagcagattccgagtcgttatcgagaacgaggaccagccagggtgccagattgcaggttgtgattcggcctgaggctattcctgggcataacggatgaattaacgctgtgctcgacgccatcaaccgttgtcatgataatagagaccgaccgatggatgtcaacacgaacaacctggtctcgataaagatcgagggagcactctgtctcatccatgacaggctatgttctcgcctcagtcgtcttgtgctgtaacggcccggattgatggtccggatgatgatgaattcccaaagcagattgcgcagtcacatattcgcctgcagctgttccatctcggcaacaatccctttacctcgtcaacacacatgcaatgcatgcaacatgttgtatttcgagactttatggctgacccaaacctactagtcatacccttgatcccaccgatacacttgtcttgtaggtttataactaccttgttgtccttggcggctcgaccatactcggctcgcctttccctcgcatcaacttgaacaacgtacttgatctcgaggcgaaatgaagcaaacaaccgtcttgatcgccacaacggcactctccctcgtatcggcacagactgcctactctccaagcaatctggccacctctctcgaattcacagaaccgtcagccagtcttccctttcccgcaacatcggcactgagcacatatgcgaataccacgggcaacgctacctcgcggtacatcagacgggagtgggacttgtacaacgagaggattcagttcggacagaccgatttacaattcgtgcaagacccggcgtcaagctcggaggaggacttggtcctcaaagtagactaccctcagggtagctatagtcacgcaaccggagggacccaattttacgtgagtcccgtcgaggtgcctctcgtagacgagtcttttcgttccgaactgatcgatttttccaactcgacccaggctcaacctctaaatgggacctctgtcagcgatgcactctcggcaatgctcgcttacagcatctacgtcccctcggacttcaactatgtcaaaggcggcaagttgccgggactacgaggtggacctagcatcaacgattgttcgggcggagatcagacggatgggaaaaagtgtttcagtacgaggttgatgtggagagatggaggagctggtgaaggtgggtcggcttcgatatccccaatcagacagtcaaaggtccggccgaggtgatattgacgtccacctttcttttacgcaaatagtatacgcctatatccccatcaccgactcgctgtgtagtcaatccggggtcatctgcaattcagactacgggacttccctgggaagaggtagtttctcttttcaacgaggtgcttggaatgacatcgccctgcatatccggttgaacaacccggtcgacgtagccaacggagtcgtcgagtgagctttcggtcgtcctcgctttgagtcgtgatcgtcgtgcgactgctgaccatcccctcgacccttttcatgtgtcaggctgtactacaacggtgtcaaagccatcgggttcgagaacctcgtcctccgtactgccgacacgatcaacaatgccggagggatctactttagtacctttttcgggggagacgatgcggccacctatgcgactccgaccgagcagagcttgttctacaaggacatgcaggtatttggagccgccgagccggctacgggtcaaggtcagagctacaagctcaagaacgctgccgcagcgagacagctcgatggcgcaaagtgggcggtcgggatgctgagcggattaatggccatggccttgctcgtttagaaggataggtgtaggacaggctgtactatgtgttgtacacgagccgaaacaggactctcgcatacatgtcgggcttcgatgatcatgaccgccttttgactgtcatcgccagctactcgcaagctactcgaaactggcactcccctcatacacgcccggcccctcgtcgtaaggattcttggtccctggaggcaatgcggcgatattccgctgcctgaaacgttccttttccttttcactgcggaagtggaagaagaggaaaagggccaagagacccagcccgagacgttgatcgactgcgagtcgaggcgagtcgattcccactgagcagcagcgacgaaaaggtatggcgtgactcactgaagcagagaagcagcgccaggatgcactgcatgatgaccatgaccttttcgtaacgcctgtaggactggaaccgtcaactgatccgcgttcgccgtgcgtcgtcgcgatatcactcactccatctcctgctccattggcatccgtgccctgatctcctcggcagagagcgttccaggcggctgcacatgcttcgaggcctccttttctttgcgctcctcccgagacgatttggcgggcgggccctgtgggaccatcatgtctttgactgagcacatgcagatgcgtgaacccatcagcttcacctcgcaaacgagaaatgacggatgcacctactatccaaattgtccacgttgttccaccacagcgtaccgtcaggcgagtctgtagggtcggtcagggttgtaaaggttcgctcgaattccaaaatgagcgccccatcgactcaccatccgccgccttgaaacctcgagggaacggtaccagcgcaggtcgaccgggacctgagaggacaaagtcgatgagacgaacgacaaccgatgccacgaaggtgccatcgttgaacgcaccgttcatggtcaggaaatactgagtcttcttggtagccgccctgacatccttcgaagccttgctcgacttgtcctttagccgatcctgttccttgagcagatccgccttggtcgtgatctgcgtcccgttggctttcggagtctccttctctttggcagccttttccttttcccgagcgagtgacgaagcagacttggcaggcgcagccttctcgggccggtttcgtgccctcttttccgcttctttttgccattctagtaagcgatagcctccataggcgatgatgaggaggatcgtcactcctggtgtcaagagggacgggattccggtcgcggcaggatcgctaaccatgccgatgataatcagtaccatgagagcttgttccaggggcccaaatttgagggcccccggcatctctgggggtggcggcgcattggcctcggcccgcttctccttgactggcggacgggagagcggtcagacgttgttgacccctgatcatgtcgaatcggatcagactcgccttctttgcaaaacgacaagagctgtttcgacgtgatcggcatttttcctgattatcgctttatggtttccagccagagggaacctgccaggtgtcagcagtctagccacatgaagcgagcgagtgttgggcgaatcgcgcttcctcggcgtcatatacttgatccgccctcatcaacacacacgcacacaaagggacgcgtcgacgtatacgcggatcaggagaacgatcaagggagcctggggaggcagcggggtacgggtccctcgacgtgcaaaggagtcgtcaacgtaatcgatatttggttgctcatacctggtacacacttgtcaacacacagatcggggatcccgcgatcatgtccccgcgccgaccgttcaccatccatcctgccatttttccagctcttcgttcagacctggtacgacctcatgcttgttccccttgtccgcggcaaacttgcgtttcaaaacctcgagccgactcctccattcgtcccgcccgacataggctccacacatccgtcgttcgccactaaacccgcttcgaccgtgcatgaccctccagttgtcgatgatgaccatcattcccggtttaagctggacccagtactcgctatctgaagctcgtacagcctcttcccatttcctcgcggcgtcgtaccatgcttccatctgttccgtctggaacccagtgttctgtccacccaggatccctcggtcctcgttgttccaacggacctggacgagctcgcccgtgatcttgtcgtgctggaacactggcacggccaaaggtttgaggaggtggcctttactcccagacgcatgtgtggggatgggcaacgtgctcagggtcgcataggcagtagggtggagctgcgcgaggatggaagcggtgtaaaacgagtcgacgagcaaggacgctccgccttgtccaggtgggggatgggataacatgtggaagatttgcagtcccgatggatccgtctgccgcatgtccccttggtatcagctcggggacgctgcggtcgacctggactctggacgagactcacgaaatacgtgttatccgtgtgcgccggcaacccttcgttcgtgtaagccatatctcccatcttgagatcggcggtgaaatcccagaatccgccgtaatgcgtctccctgatgggaccgatccgacgaatgaccttttccgtctcttccggggtggccggtaccgaggtgatgaaacagaacccaaagtcgtgctgatccgacggaggcacgtcacatatcatgatcgttcgtcagccgactaacgacagaggccgaggtcgagatcgagatggaggtcgacacttacgaccttttccaacaacttcttcatccccctctccgtaccctcttcgtccgtcttttcatcccccatcagactcccataggtgaccgtaggcggagacttggcgatcgacgcgttccacaatatccgctcggaatccgtcgtcctcgctgccgccccgttcgacccgtgttcgacgtacccgcgtgaatccggatcgtcgtacgtcgccgagttgtgggaacgtttgagcgaggtaaagttggtaagagaggcgaggatggggtggtaagacgtcttgtggaggacggaccaggggaagaaggagatgtgggattgaggggtggaccatgtgatacgaagaccagcgggggatgggtcgatggaagatggttggatgtcctccgggacctgtagagagtagtagtagtggatggtaaaccggtcaggcgagatcatggaacaggctcgacctcggagactcacgtcgagtaacccctttcgacgttgcttcgtcatcggatgaaagcagccatcgcatcgacaatgatcaaacagccaagtgttgtggaaccgggagacttcgccgtcgttccactcgacgatgatcttgcgagcttgttcatcgtgagaggctcgagggaaagtctgaggtacggtaggtgctggagaggtgagttgagtggccgaggtggatgaagccgtcggcgtcggcgtggctgcgggagaggcagctacctggttttcttgttgcctccagttggtcgaggacgagattgatctaaaagcacgatcattcacatcttcagcatactgttcgaaaatgacaccgtcttccgacaggctcttaccgatatcccaatgtcgagcggatagcaacgagtcgacctcgttgttgcctcgagatgatcttgccgacatggcttcgagcgagtccggcggttcgttggatgcaacagctcacaccaaagacaggcatggtcatgacgggatactatacaggtctgctagatgtagctcgatggagtggatggcacgttatagagtggtagtagtagctgttgttgtagtagttgtatgatccaacaaacgtcgtcatcgacctggtcggctccctccccccggccaaacgcgaagaggtcgaccaccaagctgcaccaagaatatgcaaacaaacatgttctcctactactcctcaatcagctcatcacctgccaattctataaccagccccggacctgatcaataggatcataggtctctcgaatctgacctcgttgcatgccatcgatgaccgaaaactcgtcccgataacgagcggtcacgacttcactcgacctccgcccacaccatcaaccttgctatcccgcagcccacaaccatgcgtcgtctgggaacgtcaccatcgttcaataccaccatcaaaacgtggttggtacatcgtccatcgttctgggtctcggtgttctgtcaattatgcctcggcgtcgccgtcgctgcgttcgtctcgacgttcgctcaacaagctttcaagggagtcgccaagcgctggaacattgtcatcatcgtcggcttgaccgtcggcgtggtaagtctcaagcgaccggaagggcaatggtaggtcgtcgcagggaacgtccgctgataactcgtccatatcccggggtgatacagctcgtatgctcggtcgtactcatcttggggaggttatatcacgtccgaagggtctttcaatcgatacccaaaccgtacatccccatcaaagccatcgacgtgccgaacgtatgtccttcaattcctccaaatcgccttcatcactaccactactatgccacctcccctcctcactttttccattcccgacaaaagcacgacgtaggctgacgataatacctaccgggaatgccgttcaccccgcacaggtcgtcgcgaaacatatcatgaccgagtataaccggaccgccgtcatcgctcacctctcgcagcctacctcggctcatcaagaaggatggggtcaaccaggtgggtcacgcgaacaagggggaaaaccaagacgtttctgtcggatcttagcaggtgatctgagcagcatgctaatgtcgccccctcgtcctcgtcggtgtcgtcgtctactcgtaaccggacgagacggtagaaacgcaattcggagggatttatttcagggaacggatcagagccatgtacaccgtcgtccgtgagtcctcgtcctcgcctgattcgacccacccccaagatagatcactcgagctccccctcgcttgcccctcaaacggtcatcgacaagtctcattccgctctgcaatcgcggaagcaaaaacgacatgcccttggtttaccgccccgtgaccaaatcccccgctctgccctcgagttgggatatgatcatctgcgttcgccccgttcgatcaacttccacctcggcgccaggccgaagaaacacggctccgcgagacatgccaaaacgaaataccataagatgacccaagttgtacaaccatgtctgatcttgaccaaaatcctcctgctcaccgtccgttcgaatcggatcatcaccttgctcgacgggttgaggaaacgtatctgattggtgcacgggcgtcagatcccgaatgacacacacacacaccttggtcacctgacgaaaacgtcactttgggtcgtctagtagaggggggggggggaagggtctcgcttagagatcgacacctgcaccctacgcgcaaacggtacggcacctctggagtctgggcattttccgtaatcccaacctcatcttctggtatcacacggttcttccctaacctcgtcacattgatctcactttgagcctcgtccttgaccgacaacttgtctgagcttcatggtcaggcctggcagaacgtcagttgcagttgtatacacaccgtcgacacgtcgcgtcccgccctgcgcgacggaataccgagaagccggtcgtcaggacgaaaaagcctgccgtaccacccctgcttcccacgcccggggggtgtccgtgcctgaccccgggggccaaaacccaaccacaacacgcccgctcctgcctcggcctctattctattcagttccgctagagcgaacgaacgactcgcattccaaagaatttcgagatctgaaaggtcgagcgcccgtcgtcacgtcgaacagcctcttgattcgtcacttgcatgctaggccatgattgctctctcctccccctctctctctcgtgctcttaaattcgtttatccatacatgatacaagctccacaccggatgatagcaaggtggaatgacatcccctccggtccaggctcgtctccctcgcgttcaccgagcttcagatcgcctcggcccccttccaccccgccgcatcgagatcatcagatcagaacggggtgaaagaacaagagagatcgacgggtcctaccccgagtcatacactacaatccgctcatgccgtccacatacgacggatgagctcggtgagacctgggttcagggcaaatgacgtgtagagcttgtcagaatcccgccgtctatagtcctcccagactttgccacggggacgtaccgatgtcattggtctcgaattcgtaaactccccagatactggcaccggtagcgactcgcaagagccacttggcggcgaaaccgatgacgggcatctttcgctcgtgtagatagtcgatgatgcacgagtcaaagccgatgtgcgagtggacgatcagcgaggtggcgaggatggcgtcgatgacgggctggatgagggatatagaagcaggtcaggtcagcgacgtgctctcgattcatcgagtcgcaggaaaggctggaggaggattgcgtatcaaaggcccggccaaatcgtcgttcgcatgttcgagacttccatgtcgctattccgcaatggacattctcgtccgcatcatcacgcagttcgttgatagtctggcttcccgataccggtgccacgctccgtgcattgacaacgaaccagaaccacgcactccgcctgggcagaacaactggcactcgacactcacgtagaatccggttccagggtttgcagccacagcggcacccatcacaggtacaagagcggccgacaaggctcgctcaaaaacccagtgcctcgatccgtgcgaagggtccgaatgagggaaagaggtggcatcgttgacggtaccagggagaatggctatgagagtaggagaggagagaaagtcagcatagtatcgcaaaaacatgtacgagccgtagagatctccggttgaccgagcttcgtgaattacaacaaaggaggttgcaaaagaggagtcgatgcagatgcacgcggaaaggagtcacgccgccgcctctaaacatccaggctgatcggatcatccggaggggaggtttcgaccaatcactaagattggaagatcccggacaccaccctcaagagaatcttgaccgggctgtcccgttgctctcctcgatgcacacgctcgctctctcagggcgctcggcgagttccgaaccgaaatccgtccggtaatcgtctcgcgatactcacgtccaccagggatgtacttgaatccagcagtctcgttggcagcgacaccagcagcggccgagatcttggaggactggacggcggcagctcgggctgtgtcgattacaatcccggtgggcgaagggggcgattcgagttgtttacccgtgcgaagtaaaaacggtggcacggacacaggtcgtcacgaaagcgatgaatccgtgtgccgacatcgcataatagacagatacagggtgtataggtggtgcaaacaacgcagtcagcaaacccgatgacgccttcccgatcgaacactgcattcagctgttgtacgtacaggtcgagatcagccttaacccgagaccggtcctccccatcataggcttcattgacgacagagcgaaagacattttgattgtgactgcgactatgaccagatccgatctatgaacagaggctggtagacgcttgggataacgacgaacgacgatcagatctcaagattccgacccatctcgattgtgtccaaaacgcaaggtcgatgattggggggcacggtcctaatcggtcagcactaaagcggggccaagggcgacgcgtaccgtatcgtcgtgatgtgagaaaacccggaatctcccgggaacgacccgatggtgagaccgttcatgcctatcgtttggtttcaccttgactagaagttgactttccgtctcggcatcatacaaaactcatagcacaaggccgccacattttcaggttggttgccagctcaaaatcggttcttgcaaaagctgaggagccgctgtttttgggatgccgtccaacttgcatcgcctcagttactggaacgcgtactctcggttactgcatggcaacacttcgtctacctcttgcacacatacaatcccatcttgcggtgggacaaggatgcgatagtactcccgtcttccgtgtgaccctcgaaaactactcgatccagcgcgcggtctacagtctgacttgtcgggtagaacaccgaaccggtgtctaggtctggtatgttcatactaatacacctcgtctcgcacgtcgaatccgatttccagtgatcaactaacggttcccgcatcgacacatttgttatgatgagaaaacgtgtccaggaggtccctcgtatggcttttgctcgcccctgtacggggagtactatcatcgacaacttagtgctgaggtgcacaaacatgcccggaatgggacaatcaacatattctagaggtgtctcgagcatcggatctaaacgaatctgtcgctatgagaatgttttcttatgaaagtcagaacatcgaccaatccagtatagtatcgtgtggccatagacgcaggcgaacgataatatacgtggaaaaaccggcttgaaggaccaaccctagtctggattgcaccacagcatttcgcgtagtgcgtgttcgaccttgatggcgggttgtatatcaggactcagtaatactagagggtctagcagaagatacatcccatacccatctgaaccgactgacgttcagttttgatggcccgacgagacatatacccggatctggtctgctttgaagatcggtccgaaaggcgcaactttaaggacggtccactaaaatactgaaagacgtgacggaaaaaggcttgccgattgagtaactgagcgtcttcttaacgatgataacgatcctcgctgcgtgtattcttctgtgcctgcactttaccccggtgtaccgcatcgctaggcaaaggtatacgaagtcacacggccgatcgcatgcagagcaaggaatgtcgttcccagagtgctctcacgcgggtgttaagctagtattgcctcagggatctcagccgcgtgtcgtgatgatagcacacatatatagtctgcagtgagtgaacaatctagctgatcaagacgacgatgatgacaaaatatagtttgagctgaaacgtcaaaccggtcaaggggtcatccgcggtgcaaccgctgcaggcgcgcgatacaaagcttggaattgtgtgtttaccccgttctcgctcgtactgacccttcactcactcgcaccccactcgcctcgctcgctctcagcttgcagcagattggcaaccaacaaccgtgatgaacactctgcctctgacgtcgttcctcgccttgccttccagatcctcatcctaggtttcatatccactgtatcgtcatagctaccagggtccattgctgaccgccatcgctctgggctttcacaacccattcttcctggaccattaggttcgcgcgtaaacaagtcggacatcacatcgcaaacgagggagagcagggatacctttcacctttccacctctcaacagcctccttgctcaagtctcatccgggtctcaagctcaatatctcattcaagtccccgaccgagtcaagccggtggcactggatcagacggtcacgaaatcggcggaaagaacctgacctcgcgatcacgtcaaccccttcaaccctttcactctctgaaacccctataaaatctccgtatcgacggccccgaagctcttcctactcaagaatctaaaatcgtactgggaccgccttcactccccgcttccctatattctcccctcataatccctcgacaatgtccatctcggcgaccaagaccgacccggccaagtttggcgactttacggcgctctgtcaacgagcggcgttgatcgtctgtcctctgcttcaatcggagaacggcgtcgagccgaactgttatagcaggaatgttcagatggggagccaattgattttccagccaggtgagtctagactctggtcgaaggtcgttcctgacatggcgggacctccatgctgaatcgatcgtgccgatgtttcccttgttagcatcatgcgtcgtgcacatcgccgccatcctcatgaccctgatcatggtataccacgtccggtccaagtacaccgcagtgggacggaaagagatcgtcatgttcttctacctctacatgatcatcgagctactggccatctttttggacagcgggatcatccccacggccaatgccgtctaccccgtaagtccaggtcgtatcggtttgatgggggatccgaagactaatcccttcaagtaccgtctttctatgctagtggttcaccgcggtctatgctggattgatcggagccttgtactggtgcatcgtggtcaacggtttcgtcggattccagttcgccgaagatggaacacccatgtcgctttgggtaagctcctaaccggctctaccaatccgtaaattatgacgctcaccttgtccgccgcttattgatcgacagttccttcgactttcgaccctcgtcatctggggagtctgcttcttcgtctcgatcgccactttcaaggatctggcaggtttcgaccacaccaagccgatcggattgttcatcacctacttgatcttccccggcgtctgcttcttgatctacacaatcagtcaattgatcctggtcatcaggacgcttgacgacaggtgggccatcggcgatatcgtacgtttagcgagcaagacatcagcgggcgttgaacatcggatactgactttatctctcgaacaatgcagctcttcggagtcttcttctatgtcgctggagtggtcatcatgatcgctttcagcaacaccatttgcgatgccgtctctcattacattgacggagtcttcatctttacgctctgcatgttgttgagcgtcatgatggtatacaagtactgggactgtgagtcgtagcgatttcgcttctggaagagcagacgaagccggaaactgacttctactggcgctcatgctcgcagctattaccaaggaagatcttgaattcagcgttggatcgaaaacttcggtctgggaagtcaaggacccgttgctgccggtacgtgtactctggtattgctcttgtctgcccatcaaagagattgacgaatagccctcgacgatatgtacagcccaaccccgactatatcgaagaggatgtcggctcgacctaccgaggagccggtggatcgctggtcggtggaatgaccgtgagtcaccgcgccaagttgtcggctctttcctattttgcaccgctgaacttttcggcttgacagggaaacaactattatggcaacgtgccgcgaaactataccccaagtagctcatcaggtggcgctcgggatcctaagttcacggccaatagtggatacactgggccgtactgaggggaggggccgatgttcggagaccatagagccagtattcattttttgcgacacatctattacacgccttttgtgtcaatctttacttcacatgtgtattacttcgatgggcgtatattttcaaagcacgtctgcggcttgtgcgtgaatgagatgtcagccgttaaagtcgatacctcctttacttctagggggtttggcctgcgatgatggcctgcgaaggcaggacattcctcgcaggccatcgatgctcagggcagtacaacggcacacatcctagactcccaagcttgactaaatcgaagttgaaacgtcgccaatgtggcaattagggagctacatgaacacgtgttcgaggagatgcgctgtgataggaccgagcgcttgctggttcagccggctcgggcggcgtatcagagggtccacaattgagtgtatcattccgagcgtcaacggaaaggttcacacctgctgcgcttcgcttcctcgaagaatattgccatcgtcgagatgactaagagctatcccgatcgataacagacatgcccgaggccaaagcaaaatctgagagcgacgacccaagcgatgctgccgtcgagaccgtccaggaatggccgtatccctggttggagtgaaaccccagcctatcatatcatcgatctcgatgttatccagcactatcgtgtgattgtgatgatccagcacgtctagcggctgcgcttgtcgacaggccgggctaaactgaccaactgaattgaagatgaagaaaaaacacacttctgcagaatggtacaggatctgactccgagtcaccaaccccattggtacattgcaccagatccaggcacatgtaccctcatctcctgccccaactggagaagcgctagttcgaagggtaacgattaccaaacgctcatcggatctcagccatgttcagactagccgtcatagaggctagtcagggactacaaattgggacccacggactgcaaaccttgctcaggaggtctattccaacaaaactgtttgacatgcgcgtgatggaagtgcttgagacatggcaaggagcaaggggaagaaccaatctcctgggctgcctccagctcaaagagaatttcgcctcaacgttgttgggaatttttgggatgataccaaatgcgcctcaaccccgctctgcatcgatggggttggacatcaacaaaggtctgagattaagaagctgttcagccgcagaggaggagggagattgggatgaggaatatgaggatgagggttccagggatgcaatgtcagagcaagaagagaagaaccgtgtccgagagcttctaccggctcagcacgcctttcgtgctagccttcagcgttacttgttctcacagaagatgcaccgtgatgtacagcgggtctagtcgtcacgatggccggcggataggtccccgcctgccctacgggatcatagacggcgtctcactggggctattgatcaagggtatctcagtgaatacgctgttcctcgccaaagcgtatctgattcgcaatgattaaagccagggagaaggtatctgacaagcgcagcgggaatggcggcagcgttcctatttggtaaagtacattatgtgttcctgattttgagcgttttgctgcaacgtcgacctagcatgggctacaatatcacattcgcttcttcaaactcttcgtcctccatttcatggcgatcagtaacagtccgctcacgacggtaagagctcccgcatagaacatggccggtctgtatgcggacagccctttgtctgttccaccataagcgtctgatgtacctcaaagttcgtcaatcagcgccatgtgagctccaagtgatctcgggacaagcctctcacctagtaggaagcctgcgattgggctgcctagcaagtacccgaaaccccatccggtgaccatcatggccattgcagaaggcaaagtagcaggggtggctatggatgccactacacttggcatgagcgagaaaaatgcgccttttgcagggaatgaatcgaagtgcaaacttagtgtggcgttccggggaagtagcgcctcgtccgatgacatcctccgcttacctgccgcgacacccgtcaggatgacgaagacgattaaaggtcctacactcccactcaagggccagactagcaacaaactgatcgcgttggcaccgaatgcgataatgagcgagttgatgggtccgatccagtcggctaattggccaaaggcgatgcgtccgacggcggatgcgaggttgaacccagcggcgaggccggccgaggaagaatgtgataggcccatagaggtgccgtacaatggcaggaagaagggtgggacgaacagtgggaatgttcccagcgccgaagctacgaagacggtgacataacggagatccttgaaataagacctggctcgtaaaaacacccaccgtctcagtatttaggctcgcttcaattgcctctccggcgaaatacctaccattcaataaaggctgaacttctcttccctggcctttctttgatcaatagacaagcggggaggcacactccccatgtagtgaatcccaaaatcctgaacgtccacgcggtgccgaagcgggtcaagagggcgtcgaggacgagcgaaaggacagccccgcctagcccgcctgcagcgtagactagaccgatagccaatccccgtttgcggagaaagtattgagagggtagaagggtgcagggctgcaaacaggggcgaacggatcaatatgccattcaaagacgaactcgaaggcggggttcaatagacttgccatgaagatcaaactcgtccctagacccatcaccaaacctaacgtcacgaagagaccaccgatattgtgaactgtccacccgctcaagatctcacccagacccaatatccctacgccgagcatgagcacggttttcgaaccgaatcgcttgataatgttcgagttgataatggccaaacatgagatcatggctgaagtcaaaccgccagcgaaggagagcgtcgacgaagaagccagcccgtcttctttgagccgattcaggacgaccccgaagctgtagaccgaaccgatgtagaagaaactaatacggcacgcgcgcgcttagctcgaggtgacagttgtacttgtcagacgtcggcgtacttacgtgatgatgaagcatgccccaacgatcacccagccatatccgccatctggtggaggagactccgcatcgatcacattgatggttccatcctccgggacggtttcacgctccaggtagacagtagcaatgtcctgcttgccatccgataaagacgtccggctctttcgagcgtctccgagtcggtgctccgttacgtcgtccgcccttggacgtataatttccagctcgtacgtggattcgatgttactacgagtgtccatcctcagtgagttttcctcaatactgcaggcttcagcagtgaggtgaagaggatgttggcatggtcttctgtccgaaatatcatgatctttgaggttatctatctctttgactcgggtccggtcgaccactcgggacgatcggaccggatgcaaatcagggaaagaagtcaccgatgccgtgatcaccggagttgaccgaaatcccgtcgtcattctattgtgtatgtatttcttgttctcatattcttatgacttccggaaagaatcgtctggtatgttgtctctagtctaagatgctaagctttgagttttatctggtatggtacaacttggatcacaagcgcctttcaaatatcgcgcccttcagcatcattggcaaatcgcggccggcctgatgagcctttctcgccgatttcacgtttcagggggtcgcggggaaagggatgttgttcaaatcatacggttgctgttcatgaacttggttcaatcaatttccgactcttcaaaaaaatcttcactgactaacatgtcaaccacctggatagtggcggaggatctgagctcaaagaccaggaaatcagagctagcaaccatcagtcgatccaacgaaaccgcaacagccaatttaacagctgatcgtcacggaagatggcagccccaccgggtaagggacctagcatgggtcctatacgtcagtatccttcgactgaaatatgatagggttaacctcctcaaattctttcctggcagatatgagcggaagtctcccaaacaccgaccagaattcccggatcagcgtgcttctggtgctacacgtcagtctgctcgttcaaccgtgaatacgggcgattgaagtcaaccgtcaaccaatacgacgacaatcggatcagatccttgttcaactcaccgtatgggggatcatcttccccattggcttggtttttggcctgactaggtcagtccacgtagccatgacttggtaacccaatgtgcttcccgtataaccgaattttgtcgagggagtcaatgatcaggtcgaaataccacgtaccagttcaggctttcggttcagctctcaccgcagtcggatttgtcctgggccactcccacagtcacgatcacgaaagcggttcaagacttagcgtaagtctgccctccctctttgtacccctctctcaccggctgacgattctgcgatctatcgctcacccatatcaggctcacgcgattttagcaaaggttatcgctgtccaattgattctggtgggtagtccgggcgtttttgagcgcctttgagtcttcctggaagtgcaacgataattggaaggtccgacacgttgactgatgtcagcaagcggtcacggggacatgtatcaaactatgtgcaagggacgccagctcgaccagggtcgcgatcaagatgcacggaatcctaggaaagatgtttccgatcatggcatggactcgtgggttgttctagtcaagtcgttatcgcctggcctcgccgacttgatccgctgagtttctggcagagatgttgctcggcgtcattgccgtcctcggatactgtcaaggtggagaactcgagcaatgcctagtaggttcacatcatgcgctgaaatcggggatcagagctcatgctgagaaacatcgtctctcaggcgcatttatcatgggctctgctttcgtgagcgtcatcgagatactcaggcagggcgggcctcctcccgtacctggagggctgttgctgagaagttgtacctgcaggttgcgtaagcttgcatcatgctgatcatctcccacttcggaaaggaatggctagctggacggggccaaagtcaggagtatctggacagctgggtgataatgcttttcggtatcgtcaacacattcgcgttgcatcatgacaagtggaatgaaaactggtcacacaaagatatgcagcatatcatgtgagtcaccactgattggaaatacagcgtgtgattagttgaccgactatgcacatatccccgtcaggttaggcgttctctgtaagcctcagaagccgaattgaccatggtgcccgaaacattgacgtgcggatgtgcagggtggaccggaggagcattaggtatctttctgagtcgaaaagcaaaacggtccttcgttccaggtgtcatgtaagcacactccttcgttcgcctcccgacgttagctgagacgacttggacgacccttagcatcgtgatgacgggttggggtaggcggccattattgtctcgtcagaagcggccggacggaacagtgaattgacacaggctttgcaggaatgtcggcccatggccaagccctgatgatatcgtcaaaggtaagcgatccagcgcaacgcctctaaactgacttgtggatacatgtcgtctcatagattcatggtctctttggatacgccttgatggcagctggtttcacccgcatggtggagatctgttttgtcctcgacgaagcagatagttccgggcgccccaggaatttaccctacctcacgtctctggcgagttaatgaaggtcgggatagtcgggattgtgcctgatggtggtcttaaagcttttggtcatgggtggaaccatgttcatgagcgcaacaaatgaggagccgcagcgtactcagggatgcgggtatcgatcacgtcacttatgcgctggcggtatgtacaccaatgctatcctttcacttcccatcggcacgatcctgatatcccgtcttcatccaggtatgcgcagtgtcattcctcatctttctgaacatgttgttcttgatgcacttgtacagcacctctggacgcaatgcgacattggcaaagctggcgaacgcttcagaggagggctatcagtccatccaggccgattaccaagacaccgatttcggaaacggtgcagaagctccggcagattcattcgaactggatgtaatccatgatcgggaatttggagaacgtccggagggttcccgattgtcattctaatgttcgtttcatgtcgtaaattgagggacagtgttgtacaacagtgtgtgtttacccatctcagagagacgtcttggagacgtatatgcaccacaaccaaattgccctcttcgtcgttctatcccatctagaagcgaatctcgttgatcggcggtgcccgtattgagctatagtcgaccgttgcgtccttgtccgtatcaacctccccaatcatggcactgagcagttataaacgatgggtatgtcagcttgatatggcctgtgatatggctcagcgacttacacattgtctcctttgatcatgtagaggccgagcggtaccatctccaccccttcgtcctcggagaattccctttccacgctatcggccaggacgatgttggccctgacgtcgaagcccatcaacttgccctagaattgcgatcttgatcagcacgctacttgtcaacagacctcgcccgacgtaccacaatgactctgccgtcatacagtatcacttgcacttgttctgtaaagatgttgtgtcgtagtcagctcttgcgtcactcccatctcacgggcccggtacccacgattcacgaatgagctgatggcagacattctgtatgatcgacactatctttaatggtggggtgagaagatgtctagcacagcgacactatgcaacagcctttccgatttctacgaagggtatatctgactggcagcgatgctgttctctgcaggcatcatggaacgtggtaacgaatatgcgtcattggggatctatccagatctcgcgtcaatgcgcatcgtccaagtatcgtcatattatcgtaaaccaaaacaagccttgaaagtcgtgtccaaagacgttaacctaaaatttgaagaatccctatcaagctcattcgtccgtcccttcaaagtcgtcaggaggtggtccggtaatctcgaccttgccctaaatgcgaagtcagccattagttcgcaaacttgattcgacgtgaagagaaaatcccagcactcaccttgcgattgagatatgcatcggtggtcgtcgataagataccaatggcccggttatctgctgcttctgcggacgccagacccagatcgtcttccggcagccagattgttctctggggctctttcgaggctgggtgggcgaatgcgtcctgggcaaattctgtcttgtttcggccactcgtctccacgacaccctcattctcgtcgtaagactcgtcgtcatttgggttggagtctctaccattcgtgagttgtccctgacgtgccgattcaccgacatcaccatggctagcgcgaagagccgccatgtgctgctcccattcccgctgctcagcggcatccccatccccatgctgttctttcgtagttgcgtcgagctgacccgtcttttcttgtactttgtcacccatgttggccatctcaatttcttgcttgctcttcttgcccttttctgctctagggctatgccgagcagcgtcttcagcatcttcgggatgcggcaatgttcgcgctgaagaacgacggttcaggccgggaggcacgggtaaagaatgccgcgtcgattgagtttcaagcatgtgagactgcttctccatcctcttgcgctcctcctcgataggcctgggatcgaactccccatcggcgatatcgatgacgcttgcattgtgcccctcttcccttggcataccatgcgagagataagccaaagaaagcggaagcggcgtcttgagagagttataagaatgcacgattccgtattggaatcccagctattcgaggcaatgccattcagccggattcgacacacagaggcacgacagcgtcggctcacggtgagacaacacagaaccaccatcagcgcaccctggggaatagccgagacattgccgctactgtttctggccaagaaaaagagtgcgcatagcgcaatctgctggatatacagtccgatgaatagatgggtgatcgctttggggaagaagagtccacctgtatctgagtgaggaggttgatcgatctgcatgatgacgggtggagtctttagttgtaagtctcgcgcatgggtatgaatgtacttacgacccaagtataaagatacttatagatgatgtacgacaaggcaaacgcggccatcgcgaacccagtaatgacaggcgagatgatcatatacgcaatacctgcgaaacagatccgggtcaggatgcctcgaagaaccgtttataaaccgattacccaccgatgatggcaatgatggtgctgttagggaatgtctgaccccactcaggcgtctgcatcgagtacttttgcttgaagacgcttcgaggagttcctccttgaaggatcagtttgataaaatagaacaagatggtaatgatctgcaggaggtttccggccgcacccgcggctcgctgcatcgtgaacgtcaggaagaacgtcgaggccagcgggagctgattcgcgagaatcgtagcgatagaggaaggattccgtccaatctcctcgaatgccgacatgaggcccgaagacaaggtgacaatgaggaaagagttctattgtggtgcggcgatttaaaatgtaatcgccagatgtatgaagagaggagatgaactaacgaaaaccaggaagatggtgtaccgagtcatcagggacaattcgatgctggttttccgtgggatcccctcgaaccgagcgagtactgcaggtaaaaagtcaggacaaccaagtctatgaaaagagagcagacgctactcacatcgcaagatgatgggcaataacaagttgagtacggcgagcaagacggggggtaatactccctgtatgatacctcgaacgatgtcgggggcctcacataaccaatcaagccaaggccagcgaggacatagccgagaaaggttggaaagagctccgatgaaggaacctgtgattccgtattagcttcatcgtgatgagggcgagtacacgaagctagacgtacttgggaatgaccagaagatgacgagaccagcggtgattgcataactcgcaagtcttcggatctgcgcccagtaagggtcgataccaaggttgctccagatctaaggcgggtatactcaatcagccaatgacgagacggggagcaaatctggtgctgtactcacgacgtcttcaggggctacttccagatggtgacccgtcatacggtacctgtcaaggcataaatgaacaagtatgtatcagaccgagcggataagcgaggtatgttccacttctgcttacggctggtcgtggaggacaatctgagtcgccatatgagcagcgatttgctggtgaaagtaaatgaaggccgagtttaagggcggatatttctcgccctcggttccaggcttttcaatatcgtccgccaattgtttcctgtcgacatccagaatctgggtggtcctcagaacttcacgtcgagcccaatcgattgtgtcgaccttggtaccagagaacggcagccaccactttgccccgatgcgatgctgaggcctctggtctctcggcactaagcgatccgccatcaaaatctcgttgttgtgaatcttttttcccaattcggccagcgtcaaggccgatggcgattgctcgccctccatgatcgccttgttgacgctatctgccggatcgtccctgatcttcttgcccttcgacgactgcttctccctcgtcttttccctctgaagcttctgttgacaggctttcttgacgagcgagacttgagcgttttccaatatcttcgtagccttaactcgagcgccatgtaccacggccatttctttcaggtcccggttcagccaaatcttcttgacaccgccgggaagatgatgaaacaactgagcgagcctttgttcgtccagatagctccgtgcgataccggtgatcagaatagtattggcttgcgccagggcagagtgattcgggttgatcaggtatttttgcctgatcagaacccagcgggtcatttccctcctgatgttgtaataaatccagactgtcatgcgaagaatatgttaacactcttcggtatagcgaggtcaacgcgcaaagactcacagctaaagaggtatgccaaaacgaggtgagcccatagtctctcttgatggtcgccatcaatgtttccgaaagtcaacctgtcgactccttcctttccgttcgtgttcgtcccaaccgtgttgatgggaagaagaatcaaccatgagagcagccagatggggaccaggataaccagcatgagtcggtgaaaccggataaagacataggcatctgacaaaagcaaggattaggaactgaactcatcgtccgtgaccagggcgggattggagtgcgactcaccgactccgttcttctgcaagaccaatgaagcatccgacttgtaaatctgccaaaagactcccagccagctcttggtcaacgtgtgaaccctgttctgctcggggggcatataagtccgcggcctgcgagtcacaggtcggaactcctttagcgaggtttgatgtggatcgtcctcgacacctgtactcactcgtagacggccttgagctttctccggatgatgatgaaagccaagatttctacccctgctacgaccgagttgaccacgagagatgtaatgaacgacgactggaggacaataggaagttcattcagctacaaacgtcaccatgcaacgtcattggggagcactcacagtcgtcgcagccagcgcctgggcattggcatcttgctggatatcactgtgacacccgtcaaaggttcaacctaccttccacgtcttcctacgtctcgatatcactcacgacatgacgtcttgctcctagattccctagagtggcaaggagatcgagcgttgatcgcgtctatcgatcccggtcttacagccacccagcttgtatggttcgacttgcagatgctgttgatcgagctgcagtcaaggaccaatcacaagctgtaaccgataatagctgttgctaaaaagcaggattgctacgcaatgaaatattcccttgacatgttgtcgagttgattgcatgcaaacgaccaccttctcaaaagtaaacaagcacatagacaagcacaaaggttcggcctcggcgagctgctgcgcgggaaataaggcgggaaaacgcgacacgaatctttttgaaccgtgaaaccatggccaatatcgctcggttcgtcgtatttgtcattgtgtactaaagcaagctgttacagtctccgggatgagcttagagcaacattcggcccatgtcctcgatgttctccttgatgcgaaccctgtgaagcgcaaaatcgggtgatcagcggatgacgtcaacgcgacggggcgaggctctcacgccaagacttacaagaactggacagcttcccggccgtcgagcaacctgtggtcgtaactgtcggttcgatcgagagggaatgtcagctgggagtctagacttcagcgagtatgcaagggtgatgactcacgtaagggcgacgaccatgatgggcctgaccttgacctcgtttccgacaacccaaggcttcatcttgatgtcgtgcatacccaagatggcagcctgaccctggttcaagatgggggtagacatccaactcttccaaacaccaccgttggagctgcattgtcggaaaacgtgatggatcagctcgtggtagggtggacgatcgatacaaaagctggctcacatcgtgaaagtaccgccgctcatgtcctccatggcgagcttgttatcccgagcctgtcgaaccgagtgtcaactagctgtcatggctacgtattcttcgactgtcctccgctcaaactcaccttcttggcaagggcagcgatggcctgctcaatctcgatcatacccataccctcgacgttcctcaagaccggggtgaccaaacccttttcggtcgagacggcgacggaaatgtcggcatagtttcggtagacgatctggtcaccgtcgacggaagcgttggccatggggaaagcctgaagggcatcggcggccgccttggaaaaggccgacatgaatccgagcttgacgcccgtctccttgaggactcgatccttccacctgcctcggaattccataatgttggtcatgtcaatctcgttgaaggtggtgagggaagcggcggtgttttgggtctccttgagacgcttggcaatggtctggcgcatacgggacatcttgaccctggtctcctcacgagcgccaggagccttgctcgaagcgggctcctgagcggtctccttcttggcaggctccttcttctcctgcttgggagcggcgggcttgtcctccttcttgggctcctccttcttgggttcaggcttcttctcgtccttgacgggttcctccttgggagcggcagactcttccttcttgctctcttcggctttaggggcagcaccaccctctcccttttcaatcttcaaaaggtcctgtccgacctggacagtgtcatctggctgggcgaggaattcagtgatggttccggaataaggggcgttgacagagacgtcgatcttgtcctgtttatcgaaacgagtagcagttcagtagcgagttcggaaggtagggagacgtcaaggaacagcactcacagtctcgatactggcgatctcggcgtcctgctcgacatagtcgccaatctcgtaagagaacgatcgcaaagtaccctcggtcaaggactcggccatctggggtacttttacagtctcaggagctgtttgtggaattggaatattagaatgggctttggttttggatttagtaacctcgacataccagcgaccatgcgggaggagtggaaagccgctcgaggagcagcaaaggcaacattctgctgaagcctatacgtttgaacatgtcggcaatatataagtcaattgcctatgcagtcgataaacatatgtagacgtacgttcgggcgacctggagactggcgcaagtctttaggcctcgctgagcggatcgagcgacggtgggaacggtgaccctggcggccgaccgggaagaagacgcaacgagcgaacgggctgatgtgcgaagcatgttgagatgcgttgatgctaggatgtgtgaggatgtatgcaggggagtgactgagagggtatataaatgcaaagcgaagagagagattgctaatgtatgctgtgtatgtgtttgagggagtgatgtcaagtttgaagtgagagatggatgacggacggttcactctctcgctagtcgctagtcgctactcgctgttcggcggttggtcggttttgaggtttcgattgaacatgtgacggaagagaaagggcgcgcgagacgggtcgtttgtttacgtcactcgagtttgccgtggccgaacatgtccgattcggtctcgacggaattatcaggggggacattgacatttcacgagtgattcttcgtgcccatttcgaaacggtggtattggaatagtatcagaccatctagcacagatccacagactaataaattccttctagacgcagcgattctcgacctttgatattcaaaaagcggtcatgatgtcgagcaaggttgacgcgcgtggggttcgatttagtaaccgcctccaccgtatccgccaccaccataactaggagcgccgccatagcccgactggttcgatccatagcctccgtgctgaggaggtccaggaggaggaggaccctgatcgtaaccgccgccgctcccaccgtatccgccaggaggacctccaccgtaagcaggagcgccgtacggaccgttcccaccgtgatggccaccaccaccctggtgatgatgacgggcaccggggtagccgctgtcatcgtcctgaccgccgccataggaaggtgcgttgtaagcctggggaggctggctgttgtggctgtccccaccgtatccgggaccgccggattgtccgccgtatccgccgtgctgttgaggggcaggctggccgtagccaggggcaccgccatcaaacccttgcgagtgcctgcggtagtccccgctatcattattgtcatatgaaggcgctccatacgaaggctgaggggcctggtagctcgagtgctgagcaggaggagcattgtatccaccgccaccgcccccgttgtcgtatgagggggcattgtaagacccttggttttggtatccgctggtatggatggggggagcaacaccttggttgtccattcccctccaagcagtagcgccaccggccgtaccggtgccgaatccctgctgccaaggcatcttgccacccatgatatcctgtccggcgttcaagaccgaagctccgggctagatgatcgcggtcactaagccggcagcttcacaaatgatgctcccacgtcgagcttacgatgtggatgttttgttgcgcggcgaatccttgcagaccaccttcaggcaacataccgtgcgaatggctgtgggcagcatcggtactaccgattcggacattcttgtggttctgaaccgagtccatcgtcaatcgcttgaggatctcgccctggttgtgaccttgtccttggaaccctatgaagcggcacgccagatgtcaaaacaaggtcaggtatcgaacctatgacatcgacttacattgacgcatcctctccaacatgagtcgctggacctcggctgtcgaggcgaggaaacgatcgccatcagtatagatctggagcggcgggagctcggtcatcgatacttacattggctgttgtggaagtaggggtggaacagacactgcaagatgtcctcgatggagtgatgaggatcgatcgacgtgtcatcccaagccttgacaatcctctccaccgcgtattcgacgatgacttgagcgacttgaccggcgggtctacagacgacgccatgtcagaataagtcgggccggactgcaagatggcgggcaacttactcgttcaaaatcatgccctacaggtccaatcaggagacatcagcttggtgccgtagtgtctcatccggtacgaactcacaaagtggtccttggctaggaaactatgagtcggatcggaagcgctgggatcgtggaagacctcgagctggtcgtgcgacgagatgacttcggcactaccttgagcgagcccggtagtagcgctcttgatgatcggtttcatgtctatgatgtcgggcgatgagcttcaagccggcgggacacgggatgcggttgccgacgtacaaggctcgagggtagtgaacacaaagacgctgatgctgctactaatcttttcgacaagcgatccctacgtagacaaaatcaggatctttgcacgataaccaatcgtttcggcaaagcaacacttacgagaccgggaattctctcgagggtattttcaatcgtcttagacacgttgtctctgaaagacaagacctgtaggaaagatgtagatcgatcagcagacgtctgaaagccaagaattggtccgagatgcctaccttccagagcgtgtcgtgcagctgctgaggggtcatggaatccgggtccattccgccgggtccggccctgatgttctgcacatcgttcatctccctgctgagttgacctccggtgttaccggggaggctggtgaaaagctgtcggaggacatcgtcgttaccaccggcggatctggcggatgcgaccttggtgttaagctcagagaccgaggcctgcccgtacaaagacaagtcagtcgacgcggactgagcaaggtaccaaatcagcattatcacttaccgaactcaaatgatcgccggcctcgcctttaatgcagaaatgatcttgttagtcacggccaagcaagaaacgacaccgcacaacatacccaagagcgaatggatgaaatcgtttccgccaaacgttccagtgacgaggatgggcacgttctgtccattaggagcatgcacggtaacgtttcttccaacgtgcgcaaatacttcgcggtggcccatcgactggagggtcaattcgcaccaattggaatgcgcggtgactatcgacaaccaacgatcagcatcttcttcagtagcgagtaagctgtacatgacgcctcatcgctcacagtcctcgagagtatgcaactgcaagacgcatcgacatggacggatggcggtgagttgagtaattttggatcgtctacgtcgcgctctagactcacagcactgcccatcagccgataagcctcgtacaacgcgtccgtgttaccggaagacctggcctgtcgaccggtctggatacaagcggtcaagactcgacggacgagcgacttggacgtgtcccaggtgccattctctacgtgtcggaaggatggtacgaaaagtggagcgggtcccgtcagaagtcgcgagcggttcaaaatggcgagaaagtcgatgctcaccgttagcaatgtctgcaacacggacgaaagcaatgacgatcgtgaccccatcagctcccaccttgaccgccttgcatcgatccacgttcgacactcacaattcttcatccccgtcctcggatccacctccaactctctcggatcgaccggacctcttagcctcgggtcgtatttcctcgcatcctcgttatcggcgtaatctttcgggttgtcaatgtgctcggtcgggaggtagacgccgagcttctccttggtcacttcgaacctgcgcgtcgacgacgacgaatatgacggacaacgacgatcagtactgaccacgattccattttgctggaaagagacaacgacgagctcgaccagaacgtccgacccggactcactcggcggtagcgtatccgtgcgccaagaacccgaggaccatgacgacgttgatgatggtctgcaggggtaatttctgcaacccggccttgtcgacggcttgagagtagtctcggagccagtttccaaagtagactcgctatacgcacgtccagatttgagggtcagtggcaggtccatacagcgagttgcacggatggtagtagagggggttggaagatgactcaccttgatatcgagccctccgaacttcttggtacctccgagagcggccataaagccaccccctgcggtcttggccaatttctctaggacgtctggtagcacaaagatccgcgttgacgggggaacccgtaggaggatgggaacggagcgtatccagtcagatggactcgccaatttgtaagaaggaggaaaacgactcgccttcaatgtcaccatgcctgaaagctatatcgagcgagatcgccgaccggccaagcggacagaagcaagaaggcagtcaatcgatcagctacccatcacctccggctgaggatttcccactcgagagatccaaacgaatccggggtagacgtcgagactgacctttgccctcgaggtaagcgtaagaagggatgttacccgctccgaaagctcgggctggttgagccagagctaagaaggcgagtacagccaataacacgatcagggtggatcgggatggcatcgtagcgagaaggtcggtgctttgcctggcgatagggaagtttctgttgcttgagatgagttgatgtcactgaaactgaggtacagctcgtttgcacaactctatgctggttgttatagctagctgcttggcaaagctgtgtctgactttttggttgtcttatcagctgggacgatgtcatatgctcatgggctatgcagcagcagcaccaacagcagcttcgtcatcagatcatcatcatccgaacaagcgagcgagcgacaaagacaaagacaaagcgcagaaatgacggcatcgaatggttacaagatgcgcttctatttggttgctaacagggtcgatcgagggaaggtggagggggcggctcacgtcgtcccactgccgatgtcgattcatagcgacatatgtagataggagacgacgagtgtctgccatcagcctcataattggactgagtcacttgagcactggcggtgtatggaaagagctttcattggtcatgaccaccctccctcgcaagtgaaacgctcccgggtgttttttgcggaatcagaatcggaaacggttcatcgttgtcgttgcggatgttgatgtttctcttttgttctcctttcacaatactcgactttatgagcatggtaacgctccttccatattgtcaccctcctcggccacaactgcctgcctgttgacttgactgctgtcgaagaggacttcacgcaatggaaagacctcgtcgggcccgcccgcttcagcatcccctcgcgacccgtcaaccctactctcagccgttccaggtcgccagtacgcagttcattccgccacatcgtccctccaactgcaggttaccagtaacatatcgaccagctcatcgggtctacatccccgcagcctctccaccgtcctcctcatctccccccccgccgccccagatgcagaacggaggacaacatgttcatcatcaccactaccaccatacgtaccatcaccaaaccccaccttttcctgcttctcaaccaccaccgtctgaaccattcaggagatcacatccgttcctctaccatccagccgcacatccggctttccgtcacgcacacagacccggatacgctcacgctcaggtccaccctacgttcgtgaacggaaccttcatgcccccgatacctggactcgcagtcttccctggaggacccttccccttccccccagctccttatgggcaccagcatggctggcctggttcgtcctcgaacgtgcatggcaacgaaaatgaaggggacgtggacgtagaggaagaccaggagagggaaagggcgttcccaccgtccggtcctcgtgtgttcaatgaggaccgcggcaacccattacaagcacatcctggtgggaaccacggtcgttctttcccatcccctcgacggagaggcagaggtcggggaaggaacggcgggaaccatacggggagggaaggatgcgcttgggaggtccatcatccggacgggacggttgaatatggcgaagatgaaccaaagatcgaggaagtcccacttgaggacgacgaaaatgagggtagcgtgcagcaagaacgggagaggcatcaaccgaatgaggaagcgctgaagtctgatcgaccgacgcagtatagcgaggaagaaggaattagattacagatcgagtgggaaggagccggacaagcgtctccctcgaacccctcgattcaagatgtcagtacgggagttacaactagcggtcctccccaagctgaccgtacgactcgcgagcgcccggacgtcataggacagatcgaaaccaccgatgctagaacctcagatggtccaccattgcgccgggtgatctcggatgaccaggaaaatttcgagctttccccagggaccttggcccctaatggcactccagagctgcggtccctaacagacatggtccatttaccggaaaaagatcagcttgaactccgaggtggtatgaaagatgagaagggagtgaatctcgaatcagcatacgacgtcgatatgatcaggccgtcgacgacgctgccgaagggatctcggaagccattgcctatcaggctcgaagcagcgagacatgatcaatttgaagatcctcctggacttgtctgtgggacgcacgaacagaaaacgggcgacgggagttcaatttcgaaaagacgcacactaaacgagcatcgctccagccctatcatggcgggcgatgccgaaatttcggaaggtctacccctttcggccactctgccttcgcctgagcctgcccaggtattggacaggctgctcgaggtgacaggcctctcagcaagacagttcatgaccatgcttgaacgaggagaattcaagatggaagattcggaacaggggcgagcatcttagctgtgcagggaactggttcgatgtatgaatacagtcgtatagtaacaagaggtcgtggctgtcctatcacgatatatgcacatttagtgtcaacgtgaaacacatagattcgggcgggcgtggaattgcagcgactcgtcacttcctcgccgctgtccgtcgtggtcgcgctggttcccacttgacagggggctcggagagctgccgactggctgcacgtctcgtcctcacacctccagcctcgctcttttctggcgacattggtgctgccgaagataatctcccgcttcgcctaagagcacgagcctgactagactcatcccctccctcggttgtcgcctcactcatcacgctctgacttctggtttgcctcgctgtccgcttgacgatgggcggaacgctctgttgcgaaggggtggcagctgcacgtcgggtacgtttggctgccggagtcgggtcaacctcgtgcgtctcttccggctcttcgggaacgtttgatgcggtcttcttacgtggccgtcggggcggtgttttagtttggaccccgaccaccacttcgaccggcggcgcttgtttcccccgagcgcgcttcgcgggtctcggcgttggtgcaagctctgctacgggagtgggctccatagactcttcgcgatcttcggccacagaggcttgccgcttgcgggtctcgtatcgaggtcccgatggaccgttacttcgaccgaggtcaccagctggcttgcgcgtcctcttgggcttgactggcgtctgttccggctctggcgagacaggccgaggcgcttcgtctaccacctgagcctcttcgtcaacatccatggccacgtcagcctccacagaggttgctcgcgcgaccgattgagaccgctcggggcgcctagctggttgtctgggtggaggcaccggcgtagactctgcctcgttctcctcggcgacagatgccatctcctcatcttcgtcggccgcctctgatcgagacaagagaggggatttgaacgtcggccgcgacgatgccgccggggcgttcagtcgggatccgatgttcctggggagcttgacagggctcgagaaggggctctgggcacgcggctgtacattcggccggggcgaacgatattcttgcgtcgaagcgtgagccttatgagccgggctagaaggagcagaattggcttccttggcccggacgctattggcctgattctgcaagatggcttggtacagattcgcggtcgcgctaccagagcggtggggcgaagccgagatgagaccagacagggaaaccactcgttttgacgctcggaccgaagtcctcacggtcgcggtctccgtctgggtgacgcttatcgtaactgaagtggtcgcccaacccatggaaacatcacgcgccgcatcgtccttgaactctttctctgctgccaatagttcgcgctgaacgcgtggtaacaggctggtcatgtcgtctaccatctgacgcctttcccgcttcaagcggggattggcgacctcccgatcactggatcgcacgagttccgtagccctcgaatctaggtcaatcgcatttgagtatcggccttgcgagaggagtctggtggtcaggaggtcatggaggatatcaaatgattgctgtgggaggccagtctcggggtcgaggaggtaggccgtcaggatatcctcttcgagagtgtcgataggggcagtagtcaaagcctcgaggggtcttcgcatagccaaagctgtaacgctagcaatattagacaccagattgctcacaacggcacgttcgttctagactcacgcttcaagatcttgtctaaaagtacgactaacagtcgctctcgctgtgcagtgatttcgcttagacgttctgcttcggcagtggactcgatggcgtcggccgcgatcagagctcgctcctcccttgatgactgtctagtattagaacctcgaccccttttggaagagatcctagcccgactcctaaaaccatgtctcccgctgtcactggaatcatccgccaggtggctttcgaattcgcaatttctgatccattcccacgctctcgcgaaatcctgctgcccgagagcttgtacgtaggcgtctagcagctccggatcatctaactccggcttgacaaagtcaacatatcgtgtaatccacttggatgcctcaaagctgccaatatccgacaaggtgaagaggatcttttcgaagtgacggtcgggctcgtcagacggtaaacagaggtgatatatcccctcctttgaaaagacggcaagatgagctcgttgcgttgccttctcgtgcttcacctcgaagctcacctcgatcaagtcatgatccagcgcccaatatccacgtgtccgattgacagtcgattcgctcaagaagtgactcttggcgtattgttctgctggatttgatcgatcttggaaagatacggtttccttcccttgatgcaccatgtctaacaacaagtagtaaagcgaagcgtcttcctcggacggatctcgctccgtgacccggtatatgtactcgaggaggtccgaagaatcagacaagggatatttaaaatctacaggcggggagtctgtaagtcgtcttgtgtgattcatcaatctcgcgaggtagacaacgggacttgcctttctttgagacccgtgccgacatcagatgatcgatcatcaaagattcatcggacctttgggctcttctcttcttgatagcatccctaacatccggagtccaagggaatttgatatcaggatcgacgactgtatcgtcaaattccaccccaagcatgtctttaacgctggtgtgcaacatccttctattgtaacgcgccgttcctggtcgaggcggcgaccttgacctggaccatgatctcggcatcgaccttgacggcgatcctgatgtggacctcgattccggttgcgacatgatttcttgctgcgattctttatcgccgttgcagctagtaggaggaagtatcagaacgccggcactttaagcctaatgacaacgttgagacagatgacgaccttcggtccacccctgctcgaggtctggctaagattggcgcggacatacgttgttattttgcatctccatattctcgacttggaaatccccggccttcgccctcgaccgtcgttctcagaacggtattgacaggatttacaacagttctcaataatcagctatcagttcgtatcactgaaaagagcttccaaatcttttgagactcgccaaaatggtcggtacctgctagagtcatctgatatggcagcctgggccatgctcaacctttgactcgctctacagatcatcccggttcgttgtttttcttgcggcaaggtcgttggtaacctgtgggagaagtacctgcaactcctcgcctcagagctgtcggaagggtgagtgcggagtgattcttagtcttgtgaagacgagctgatggttgactgatccatcgcagagaggcaatggacaagctcggactgtacgcgagcaacagtgattactcttcagcctcggccgaacgctgactcgactttctgttgataggaagcgatactgctgtcgtcgtatgatcctgactcatggtcagtccccacttagctttctttcatcagtcgacgcaggcggctgacactatcctcgcgcttacagtcgacctcatcgagaagctcttgatgtacaacggttagcggctcagcatgcctccgtgctcacgagaatcgtgtactgaccttgacctattgtcaacagtctacgacaagcaagacaagcgaaagtacggagtggctggacgagcatgatcaggacatccggcgatattgcgacacgcccgagatggtcacccctggaccaagtcaaccgggaagaccacccagggggctctcgagatcagtcgtctcgcaaaatggcacttctccccacgaggaagggccgctaccttgctctctaatttcacgactttctgcttttcatgttctacagttgtataacaaccatacgctccatcgatttacaatgcatatggtgtccgaaacaaatgaatgcggcattcagccagaagcgattgtgacaagaagtctcggtcacgaaactctagctggcgcaggcagaccaggcggtcaacttgacggatgcatgggtatactgaagctcatctatcctgtctagtcttgatacaacagcataacgcgcttggaacagattcacaatcaagcgtaaaactctgcaggtgttgtaattcaattagaagtcctgctgggttccttaatcggtcaggtgcttactcttgttgatcaagaaaatgagcgtattgactctgacgcgggcaacttggtcaaacatgtcgagcgtgactttgttgtcgaatttagcttgtaacaggtcctccatctttatctcgcaagtgcccaagatctggttggtaggagagacaatatcgagcgtaaagacgccaacctcgtctgatgacagaataacggagagcttttcgaattggcggggggaagtctgctcggcaggcaggaggatgtctatcggggatggaatttgtcagcctgactcccttgggcaggcagcacttcaggagaactgacgtttctcatacagctcagctgccgagtaccgatacgagccgaattttgcagccttcccggccttttgcatcgacctcaaatgccgagcttgcttggacaatggccagatgaaacgctttttcctgtaattgtcggtagcacgtcaagagttgcacttgctgtaaattccgggcggacagcactcacccttgcttttgcatcgtgtccatggctgatgaaatgtatttgttgtaagatgcgatctgctcctccagggcggtttttttgtccgacgtgtataccatggcctcgctcatcgcggcatgatcctttttacgacgttgccgattcttgttctgggtccggatatctcctgcaatatcgtccaggaggtcctgccaattcgtctgcctggacaacatcgcttccttttcgagtttcatgcagtattgaatcgctcgcgccttgacttctcggaaaggtaatctatcatcgcaacgtcgtcagaaatagcgctggtacctacctgtggctaatgtagacttacgagcggatatcctccaatctgtaatcagtgccaccgggcacagggagcggaggcagcgaactcttatgttttcgaacccgttcccgcgccacatcctgctcgaccacatcctcccatatccattcgtcttcatctgccactggtctcgtcaagacgtcaatcaacgtcttgcctgattgcactcgaagcgtagcaagaatgtgccgctttgcctggacccaatcggccttcgaacctgacatcgggtcgcctgcaagggttctgattgagccaggaacagacttgaactccagctatttcgacctactggagacagcagaaaagcggtttgtcaagctgaacgtaatcggcgctgtttgtccttcttgatacaggacattaggcacccctccaagctcttccaagatcggacggagagggtccgatttggaaatggcctgtataggtataggtatcttgcgcgttacgatctgatggtgtaaacattacggtctcaaaaggaaaactcacgatgagatcgagctctttgcggagcgtgttgtgcatagcataaatctcggctcgagtcatggtgatgggtttaggcgcgacagagacttccacgagctcttgcgtttgaagatgactctccacatcctcgacactggcaactacgggcggccgtgtttagatcggaatacatcttactggcaaagcatgaactcaccttctaagatccagtcacagaatccagccgaggcgttgaagatgtaattgtcaagcgttccaaatagctcgacatcatacgttgtaatacggtagcaacccgtcgcaatcatcgtgatcaaatttgcgatttcggtgatgttctgtcgcggcagagcgcctacgagcgatgctacaacaccctgggattccggcgtgctgtcatcaccagtattagccaggctcgaatatcaatttgcttgttctaacttacacaattccaggcaagatgtaaggcagaatcaagcctctcgcaatgacagggatgagatccgcatcttcgacttgatactgcgtcttcacctgaagagcgagtagcatttcgcgagccatacaacggattgtatacggaatatgtttcgtgccggcataaagtgcggtaagcacagcatccgtttgcagctgcaaagccgcgagttctgttcaagcgatgtgcacggtcaacgcgatacaccatagaagctcgacttttccgagccagtacatacgctggtagaatgcgcgtgacgacgcgggatcttgtgtgacagcatatcgagcgtctacatcccggggttttgtgctgaccatgccagactcgctctcctcgtcgttgagaatgcggtgataaatctatacggtataaagaccagtcaactatcgcacagtctttggctgcgcctcatcggcatacctcgacagggtcgatgcaaaggtcaagatcctgcatcttcaagatttcgccgattgtgcttcccaagatagtttttagctctacaccatgcttagggcgaatgaaagctagagcgatatcggtgacaaccaatctcgagtcgatcagagattgtgctgactccatcgttaaaatctgctcgtgaattgagagctgtgaccataaccatagtcagcacgccgccatggcaccttgaagcgggaggccctcacctgcaacagtttaagcaagagatactcctcacgccgactttgaccgtaactatagagcgcgaggacaacaccctgcagcagtcgtctgccttgttcatccacttgattggctgtctgaagtcggattaatcttgcgagatacttgggctgagtttgcaataggaaaaaaagatgctggtagagttccaactttctacggctcgctcgctccaaggtagcactatgtgagaacgggtcggaattcgccaccgagaaagattgttggtcctgctgtgcaggcagattgccggcgattcccttgactcgcacgagatcttcgaacgatagtcgattttgcaaaatcagagcaatcttcgtgtccaattcggtgacctgcgactccaaggtctgattgaactggatgttctcgatcacttgtttacgcaaccgctcgacctgaatttcttcagcgaaatcactctcactgtcgtccagcagatgcataaagctctgtatcgcggtgatgtcgacagcctgtcctgagacgattttcctatactgttcacgatgcttcctgcctctccagagggcttgaaccttgatgattttgggttgattggcatgataccaggctagccgtccccagtaacgctgtctggccagatgcccccgaaggagctgttggcagaatctgattcctgcctgggtctcttcatccttgagatactcgacccattctcgataatctcgtcgggcaagaacccctcgagctagcgcctgaaacccaattacatccggctgaacgaattcgagctcctttttctgctccgtcgtcttcttgctagccagtttcgatcgcagcaacgattgcagaccgcctattgagctggcgatttctaccttgcttaaggctttctgcatgtcttggtgggctctatttgccaacttggctcgtgcgagactttgcagtgagacaacattcgattccactcgttccagtttcgtcaccaaagaacgcctttgccgtcttgcgagcgcacctcttgcagcagcttgtagcgacaccacgtgattcgatgtaccatcgagtgtctgcacgtgaacccgcaacttcttgcggtatagcgccccccggatctgcgcttgcatcccctcgatgttgacaaagccgtcagatatcgctttcctagtctcagcgcggcgcatctgggcgatattagctctaagcagtgcttggaattgagcgacagattgcgaaacttctggtttagtacattctgcggtcagtatactcttgctctgccggcatcgtcgagcccggagaatagattgcagggcgaccacagctggatacgcggcatctagctttgattgctgttgagatatccttcgccgggtcaggcatccccgtgctcgggcttgaaagtgcacatagcgttccgtgccagaagcaaacaacgagcgctctcgctcgacgtgccgcctggtctggtgggcacgacattgcgcctgcaacatgacgacccagtcagtcaattcgtttcgagcgtccatttcctccagaagggctcggcgagtaagggctcctctggctcgtgactgaaatcttagaatggacgcttcggccagctgcagatgattggcgagtcttgatgtcgactgtctctgactgaaacctctcaggaatgcttgcagctgaataatttcgggctcgcattctaggagcagtcggtccctcgctatcgcatgggcaagtttggtttcagtcctcgcaatattattcaggatagacccgatttaccttcttcctccgtctctgcttcctcttcgggctccatgttacattccttggccaaagctgtgctgacggaattgaagtttggcatagccagtcccttcaaaccttgttgggtttgtgcgagctgttcgtctgttaattgtcccggtcagattagtggaccaattgaatgagtgcttgcaagagcccatacctgagaaatcgaattggccgactaaattaccaatcttctcggccattcccaaccgagcgagcaagtgactaaggcaatcggcgcaacaggaatgtcaacgagctggcgcgctggtcgtcattgcaagcgatttacctcagcacgtgtatgcaatagatgaccttgggcatatttttcttgttgtataaatccgtcgtctcgaaaataaacgtctgaacgctagcgggatcagcacgccttgagcatgaatcgcggtcagcttgtgaacctacttcaggtaagcctatattccggacgaaattaagaaagtggacaatgttgtcagattgccggaaccgatgtttcttgtcctggacagcacatcgataaggggcgtcagtccaccggtatggatgggaccgaagcagccagcattcttacctcccaaatatgtctcaccacttcttctccttcgtatttacgggctaacttggccagcgccacaccgtccgtcatgctctcttccatctctactacaccgtatcccagctcttcgtcgagacaaccttcgatccactgttgtgcctcaccaacgtgacacagatactcataggcaataagctctttacgctgacgatccatccaattcatgttgagccgcttcgaaggtaatggcgcaggtgccatggacgccgaggtggacgacgcaggcaatttcgacagccgtaatctacctttgacgccagcaacgcttccactacgctctaatgtctttggcgtgtcgatcagacccgctgatcctttaggagtggcgaagcccttgcccaccaggccttgcatacctcgaccatccggcatgattcgtttgggtgtgaccggctgttcagcacgactggatgagaactgtaatttccgcgggctggatggtgcggtaggtatttctgaagtcattaccgaaagagctccctcgaaggcgcgttgtctctgccgaacggaagataccgatgctggtctctctaaaggtgtgaccggcgcctccggtacttcgatttccaccttgttagctacttttagcgggctcgacgccgtagtcgcgccgtctcgtgtgtgcgctggcttgatggctttggcacgctcctcctcccaatcctcggtaaattgatcgcctgaggcgatcctgggcaaatgctttcccagcttccgtccgtctgtctttccgatcgagccgtaacggtttccgggcgactgcgcttgaattgaaggtcgcctggcttggccatacacgctggagggaaccgaagggggtacgaccgagcttttaaaagcggatttggaatttacgggcgtgatattccgtctgccttcccgcaaagggggtctgacggcgtcttcctccattgagtctatctgaaaactcgatgccagcgggctttgacgtttactagaaggtgagtctagcagtgggttgctatccgacggtttccaggctggagttcggtgtgacccgccaaccggatttggattcggccagtatggctcgcccagtagcgacgtcgagactcgttttctcactgatctcgaaggcgacatgtcgggtttgtatagcggaccttcgttcttgatcctctcgcggaaagctctgacagtcggtgacagatcttcgtcaggggatggcggtttcaagaggatcgtcgtagtagcctttttaggggtttcgatcaacctggctaacgcctcgtcgcggtggtccttttcctgatcaggctcgacactgtcagccccaggtgaagttggtggatcaagctctaaccgtcgcctaatcgctgtagcaaggtgctccgtctcgacgtcgtcaaccttcttttccttctcaatctcgacaggcgattctgtgtggaaggatatagagggtactgatgcagatggtgcgggtagaccgtcccctgagaaggtcatcattgaatctcgcttcttggcttctttcctcgccatgtacgagctcttgtaccttctctcaccgttgtccccaatgatcgagctgttcgtgctcgaaccagtgatatcaggtagtagcgggttactcgacgccatagtggacgaggagaacgcccgatccgatgcgtatgaggatgccgaaatcgctggacgttccctggactctgcgatcatgcccgcaccagcttgacttttcacgaatttgtctgtttcctcttgcccagactgggtcggcagaggtttcatggccggaacgtatgacttggctcgtcgatgtaatagcctctggagactgtcggttggcgctgatgatgaagatcgagtcgattcgtcgggggacatgggccgagatccagccagagagcctgtccgactgctcacggagctgatcgaggctgcggttcctggcgacataggcccagatccaggtttgggaatcgcattcttggctccaacaccaagctcttcaaaaagtttccgctcttctgcctctctctgagcccatttccctctgacagatcctacgtcgatactattcttcttgcctggcgccgcatgacctggtcgcattgtagcttgaccaccaaattccgatgccgccaaaccagaacccgagcgagccagtagtttggcttgatatccaaatactgcaggctctcccgtcggtgccgaagtgttattggcactagatcccatgttggttgttgtattcagctttccatccagaggatcttcagctgagatgttggatgttgatgatgcagctagtttactatcgcgaagcgagtcggtcagctatgtcgaggttcccaagttctgacgatccatgttgaggcaggtgcgtcctcgtgttgatggcgaatagttcgaaggatgaatggaagcgataccagcacacctcaaaggaaggcccggcgctgtccatcaatctgatcgagctgatcacaaccgcatcatcatcatccgaaacccatacatcttgagctcaagagtcccctagtttcttttgtttacatccggcttaatttgtaaacaaaccctttaatcgcgggagcccctaattagctcatcggaaaaacaggcgtaaatcgcaagaagcaagaagaactcagatctcgaatagatcagaatagtcagaggaagagggatcctttcaaatcgtccatgccactctactgtactctcatggatttcgcacgatacggcctcaacccgtctgaatcgggcggcgcttcatgtacctgtatgtttgggactgccatcaactaatacttggcagcttctctcgtgatcaaagctgcaagctatctggcatggccaaatatgctagtgtggccagattcggtcgaacttcccggaacaacgacttcgtcgagggtgatgctggaagacagtaccggaccgtgcaaaatcgcgcaaggcaaccgcgatccggcgcaccgatatctccttacacaataatattcatagcagacagcacatttccgacacttttacaatgctgtccttgtaaatcacttgatggtaagccgttctgacaattcgatcctggaggtgccacttggctccttaggccatgtccacgtcggcatcgccggatacggcaggtgcggcggtggaagcagcagcgggagcaggctaaaaggcatcaccagatcagctttactaattggtgacgctgagtcgatttcaaatgactcacagcatggtaagtatcgagctccttgtcgagatcctcggcagtgacgggtttgcggctcctgggagcagccttttcgcccctagccggcttgggtcccctgtccgacctgcctcctcgactgggagcaggtcccgaaggatgaggagcccgcgtcgcgcctcggccccaagcgtccgatctatttcgcagcgaaagtcaactttggcggcgcaacggaaatgcagaaagggtctggacatacccggcgttgccgttgcgaacgggtcccgaagccctgcgatcattgtttccagagtcgctgcgcatcttggaaccgccctcaatcctacctagaagatcgctacctcccttcgacatctgctcagtcgcacgcggctgataatcgtcaaacctgatggccaaagcttgacctaaaagcgcatggctcaacgtcagtggcaaaatcttttcgcgccaggtgcatctcgtttcgaagggacggctctcacccttcgcaaggttaccgtcgaaacggttgatcgcgtctttagcctgcttgttgctctcataggtgaccgtcgcgacgccagtggatcgtccagatcggtcgtactatttcgggcggaaaggtcgaccacatgaccggcgtataacgagtgatagaagagagaagaaaagccgtccggcgggagacgtatgagcttccgtatctcaactagagagaacgagcgcgtcagtataggtacaccgtcgacaacacggattcgttctgcttactatcgctccaacagaccagcagaaatgtgagcacgcccggaacagacatcacgctttgcgcatggctcgacccttccggcaaatctacacggcatcgagccccctcacatcgcgacgtcctgatcttgtaccagattgctggcaagccataatttttgttcgtcgtaacggtacgtgtcgctcgaatggtccacatctcggaggggaaagggcgaagcgaagcaatcagattcttacgcgaatgattggaccgtcggtgatggttccggctcttgagaagatggtctgtttgggtaaagtcagcctgactgaggcaagtgcggggactggtgataaatgcctacaatcaagtcgtctttggtgacttcgtagtgaaggttggagatcaacagcctagtctccctgccctcggcagcacgaggtctgtaaccggcacctcctgcgggccggcttcctcctctctggttgaacatgtcatgagtccaggcgccgtccgtcgatttaggaggaggtcgctggaggtatgaagacggtcagattaactgaacgtaggtagcttgatgaaaattcgtttccagagacgtacagcataaggcgtagcgttggtggaagcgggccgactcggtcgaggagctctaggtgcggcgggacgcgatcccttgcgatcagagatgcgttcatcgagactcttttcaacgtccattttatatcgtcaagattatcctgtttgaagtatcggctagctgttgatagatagcgttctgatcaagatttgtcttgttcttaggtgagtcgatctgggctgttgagctacaacttgactaacgtagacggggtggtcgatcagaagggagggtccagcgaaaccggctgagtgttcgggttccttcccggactgttgaatgttcgcaatgtccgcatctcgaccgcgtcgcgtcaacatgcgaggaataccgacccgcaccagatccgagggagttgtcaacagatcaacagatcctgctgagtgctcgatcggttactagctaactaggtaacttgagtcataaagatcgccccagcaaacatcttgaacagaacgaaagcaatgtccggtttatttcctgcttcaaagtcgaaaacacggcgcccaaatgccaactcttcgatgtcgacgaatacgcccatgggagcgagctcgcgtctgtcgggaaacaatcactctggagggcaggcccagcaaaaccgtcagctctctgaagagcagaagcaagagataaaggaagctttcgagctcttcgatcaggatcacgatggtgccatcgattatcacgagctcaaagtggccatgcgagcgctgggattcgagcttaagaaagctgaggttctgaagttgatccgggatcacgaccgacaaggcgacgacctgatggaatacgatgatttcgtcaagatcagtaagactcggatcgtagacacctaaagttgatatcgagctcactccgggtatcttgttctcatttagtgaccgctcatatcctcgcgcgtgaccctatggaagaggtcaagcgagctttcaggctgtttgatgatgaaggcagggggaaaatcaacataaagaatctgcgacgggtagcgaaggagctcggcgagtcgttgggcgaagaagagctgtaagtcatggttgccgtccttttcattttgtggttcgatgtcgaccacacgctaacttcgaggctcatgttcatcagacaagccatgatcgacgaatttgacctggaccaagacggcgaaatcaacctcgaggttagtgaaacaagcttggctatcttccaggtcgctcatatccttcgcattcttccaggaattcatcgccatcatgaccgacggagaataatcacctcgatcctactctaccggcttgctcacacacttcgatttatttcaggcgtctcgcctcctgaccacgataacctctttgtacatcacttaatgatataacgacctcaaatcggcttcggatacatgctgtatgtggaaaacagtctagtactgcctgagacctccttcgcctccggccatccaaatgttgccttcgccgataccgaccacgacgctgtttacagggaccgcgtcccagcctgcatattcctcaataacctgaacggatccatcttgagcagagagatctgcacggaatggcaagcccgaggcaggcgttacgaccagatccactccgctgctcgtcttgatgaaagccaaatcattgacgatggcttggttccgggaaaagacccacgtattcacgcagtccccacttccagacatggtccctatatccctcaccacgatgatgcccttagccgaagcagatgcgagcagtctggtctcggggtcatatgcgaccgcgtggatcattccgctctgacgatctcccggtaccgcagcagtcttcgggacgtgcgggaacgtttcgatgatgggttttttacttgccaggtcaaagattgccagtagtccgttaccagaggacaggccggcgataacgagcttgtcggccgtatcttccgccaattctcccgcaagcgttctcggctcaaagtctgcttcagccggcaaggtccccgcagtatcgctttcgcgaccgctttcgcgcttcctgatactctcacgcagagctcgagccccggggccgatggcgatcgtttcgactcctagaaagctcttgttgtacacggtcgagatgcattttcctgcaccaacgtcccagagcttgatactaccgtccttgctgcctgaaaggatattccggccgacccccaggatggcggtggtcgtgactgcccgtttgtgtcccgtcagagtacgaggattgatgccagatgtagacgaaaagatgcgtatggtggcatcggacgacgcagtaagaacgacctgcagattcgtgcaaacagcatcagggacggattcagacaattggtaaagcctgtgcactcacctctccactaggaaaccatttgacatccaagacgtctccaacatgccccttgagctgcatcggtttggcttgtgatttcgatggctgcgcccctgccaattcgtgcacgtagcagtatccgtctggacctccgtatacaatacgagttccatcaggcgaaatatcgatggcgttgatgtctagaggagcctgcataggatgccgcaagtcggtgattgtctgccgaaattttggaagagttgaatacccactttggaaccctcgttgtgaggcggagacgcagagctccttgcaaagcgaaccaaagtcgattccagatccaaagagggagccccgacctcgaaagttctctaagtcgcatcgatttgatcagtttcacagcgggcgatcactgtgggaccttcttacataattccttctttctatccggactccgtccctcgcctggagcgcaaccccctgaagcccttcgcctgtcctcttgagcttgaccttaccgtgcacggagctttgaccttctttgtactgacacaaacggtcgatcagcggttgcgacacgggcaacgcaatcagttcctttggactcacgcaagatacccagatatcttcttcctcgactatcccctgtcctacatcatcgaagactgctagcgtgtcatgctgttacgaaaagcaggattggtcggtttcttttggctttgaaacccgactaacaatggctgacctgtatgtctacggagggcagtggctgcagactgttcatgctgacggcgaatcgatgggagatggtgttttatgtagactacagggacgctgattctatctaaggccttaaccctttcgggcgggaaagatgatggcaaaacagtcatgtcttttgagcttgaaaggtctaggcgaccgaaagcaggcgattcgcaagctcggaatgcggggaccccacagttcggtcgacccccgttcgccgttgcctcttgggacagctgaacgatatcacctcctctagatcactatcgcgctttcagctttcagcagtctgtgtcggcgtaatatagattcttccgtgagcatggatatattccgatcggcctgtagaaaaccgctcaagattgcttaatgatttcgtcaagatccatcctcagccttggcaaaatcagaagcttacaggattgaggactcaggaccggatatcctcgcctgcaagtcaagggggcggcttcagctagtaggcaatgtcgcccttctcctttctctccggattcgccctcccgagtctcaactctttcaatgcatacttgccgaaccttcccttgccggaaaatatacagcaacggctggtatctttcgttcttcgtagaacgctcggccgattcgttcgacatgaaggcctgcttggggagaaggtcgaggcggaagtagcgtccggcagaatcactttcggacggctcgagttagacccagatgtatgtgctgtgtacgagggcgtctgatatggcacagactgacccatcggttccatttgcaggccatcaccttataccttccctccagcgtgcctttgatatttattcagggtcacattaccagcgccgacatacagctgccgttcccaaatcttctatcagcagctctcagcatttccctaggagaagttcatctttgcctcggactacgagaagccgtagatgacaaggaagaggagttaggggtcgatctggaacagtcggtcctcaatgtgaccaaagacttcgtgtccgaaattctgtcccttcatgagatacaagatctctcagcttcgatggctcctatggctgacacggtagaagctacagacgatgctagatatcagacacctggaggcttcccggtacctaatacacaagcatctcccgacgatgcgccttcgacttcgctgttggcttccgtagtggagaatatcctggcccggcttcaagtgcagacagccaagatcattgtcagattggaggtgcccccgaactggtcgcaggaggaggagctcgaagcttctgacttctcttcgctggatccgccggtccgtaatgagatacaagcaatagatctgagactcgagagggtctcgtatggcccagacggcacggcagggcacgacaaatcccggacgatcaaagtgggagatgtggaattttggatgatcacggaaatttcgagaggaagcgatggtcgggatggtggcgatattgctgcaaccacaagatcgagtggtagcggctcaccggcctctcaagctcggacacgcagcttcaacgcagatcacgaggttgcagatttttcggctctgcttgaaggttcaagaagcatgtatgagagtgccctggagtcaaccgtttctgtaccggacatacagctcgaccttgaccctttcggatcccggaacacatccagctcgattattgaagagcacaccgatgctgagaaaatcggcgcagcagaatattgcatatgctctcttggtgaatctggtcttcaaatcgtcctcgaggaagcaagagatgggaacactcggaataccgccgaattgaaaatgggggatatccagctagctctttcgatcagtgacttaagtactctagccgcgttgtcgtccacgtggacgtctcggtcgcctttctcaactcgtcgtagctcgatcccgccatcatcggcgagccatccagtcgatgcgaggtatacctttgccagcactcgcattatggtatacaccatagaagcggaccagccaggacttgcgccaattattcaacgaaaaagagattggagccttcctcatcagactggaattgagttgttcttggatcatctaagtggatctgtgaatgggggatcatgtcgcatcaatcttgatgacaccaaggtggtatggcatcaagtagaagaggagacgaaggtgccgccagcacctgtggtacttctttcccttgtaccggcaatcgacgagagcacggcgagggaggagactgttcatccagttcctctcaggccaaggtatacaccgcacggaactacgacaaacgaccgcacggaatcgggcaagggactgtccatcgagatgcaacatgttcatggtgagccgtgccatatcgagcagcgatggctctcggctaacgcgctcccttacagctagggtatcggcttctggtctacgtgtctccctgagtcttccggtagtggaagatatgctacctttcatacgtcaagtctcaggggtcctggcgcaactgacaacagcaacggacaagcgcgagcatatacctccacgcgcgaccttggaaacctcgtattgggtctcgtgcaagtacatcagtctggaactgaggttacctcttcaagaccgctactatgaggttgcatcgtatcaagaaggaactgaccggcgactcgcaatggaggttttcgatctatcgattcaccaagatgccaaacccttggaaccgtcattgtttttcgacgacttgaaaatatatttcggtctcgtcaacggtaagtaatggatattctatccatttacttcaaagtctcatgagtgacccttgggatagagccggatatacctggtatctgcgcaatctcttcaaacacaccaggcgaggcaagctcgaaagtagccgatcggccatccctgtcgatggttcgcgttgacggttcggatccatgtctacgcggccggcttccatcactaagcctatggctggatcatctgtcctcggctggtttgcagtaccttgctgatgaccttggaacttggctcgattccgcgatacacggtgaaaatctctcgacgcgcgataacataaagctggtcagcagcagattttttggccccacaagcattgcgtctccactggacttctctttggaccagctagaaagtttacacagtcagacattacaagtggacatcggtacaggtcagtctctatgcgtaagacgctaagcggcttcactgcttatgagggacagtcttaatatggatagttcacatcaccgtcgaaaccgcaaattacgacttgcacttgcatggaacggacggagctgtgcgaatggattcgctgcaaggcaaagaggcaagtcacacggtctctactctaacacgatttgctagcccaagttgatcttcctacacagtctggcaatgtaatcaagctagaatgcggcacgctgagcggctccatacatcgattcggattggaagccatccccctcgtgaaagacttgtcgagaccgagcgagacggtcagtcgtgggtgacgctcgttttcaccggaccgctgctgaaagatgaaattcctcttagcttatgccggccaaacctgcgctcgcgattggcttaacaaccattcagatggctcagcttgctgtgaagcagacgactatcagtatcggcctgttctcaagtgccatatatactgcgggccgagatgcctggatggaggaaattgcgtggactcttcgagcacctaaggatgttagtccagcttcaagcgacatgactgaacatgctctaactctttgccttctccaggtgtttgccaacgttgtcccgagtgacgttaccaagattaccctcagcatggaagaggttgcgctcatttacgaacgggatcaaggtggtgcactgtgcttcgatgtcgatcatttccgtcttcgaacggctcggcagcatcacgcgcgaaatcaagacttttcttttaaaagcgacgaaatcaggctgcacgcatctgactcccacaagcggacgaagatgtcggactccgcgacgggacctcgtacatggcaggtatgtttctgcacaagcggcatcaggtctccgccgccggctcacaagccgttcccacctaacagtcagcagaattctgtgaggttgccaagttattgaatctgcgtgccaaggtatctattcaggacagtttcgaccaggtctcggtcagtctccttcagtcaatcctcctccgaattgcagctgatcgtgtttttcaggttgaggtcgatcggatggacactactttgctaggttgcgctgattcgctacgtacgactgttagccacctgaaagcgctgtcattagcttttcaatccaaaatatcggcgagttcggaaagcccggttgaaagcaaaagggcccctgacgcattgagacaggcttttgagcgcggcattgatattgcggaaagagcgttttcgccagacaccgtcaggccgaccgaaggcgacttgctggatgacgatcttcccactcaccaacaatacctcacggtttcgagaaagggcaaaccagaccaaaaggttcatcaagatactcgaggaagcgatggtatcgccatagaatgccgcgattggttctcgctggaatccgatcatttcaaggcgctcacgactgatttgatagaaggaacatccacttggtacgtcacctggggctattttcgttctgaccgctcaggctgatgtttttacgcaggcataagtgcgctttacgtattgaggcgaggaattgcaacttgaaattcgagttgttcgaggggtatgattgggcctctacaatacgagcgattgaaaccgaacgcaaagcggtgcgacgtcagctacagcgtatccgtcaagtcttagctaccgggcaagagccgcccgatgacttctccgggctgagcagtctcgtcttcaactcgatccacctcggcttgcctgaagacactgcgtatgccagcccggcagagcttgccactgctatcgagtcaagcttggaagtgatgggtgacgatctagaaacagacggatggcaagagcttggtgaccatcacgtgcacgctaacacgaaccacaagacagcagccaaaccgctgatacgttcgaatcgcgtcgggatcgaggccaaaatgcttggaatacagcttcaatatctcagacctctgtccccacacatgtctgggttcgacgctagcttggacctcagtgcggaaactttggagatactcgataacctgccctcatccacgtggaaaacgttcctcaaaacgaggcctgctgagcggcccaaccgcagatctctcagaagcgaaccatccgcaagccgttgcgagattcgatggttcggttccggacagaatgagacttcggaatccagtctcagagtgagcatgtccattgtgggtatctgtcgcacgcctcgaactgatttcgatcgactatgcagcttaacatactacctgtgagaatgcatgtggaccaagatgcgatagacttcatcaagcggttcctgtccttttcgactcctcgggatgacggagacggttccgaacagccagcagactcgtccctacaacccgctcagtttatccgtaagcagcgatttcgtcagagcaagcctgctaaagtcatccggctgatgacctgtacggagcagaacgagccgaagtctccccaatagagatcagactcgattacaaaccgaaacggattgacatgaactcgttgcgcaagggtcatctaggcgaattgatcaacttgtttcatttcgaagacagcaaggtagtcctgagacatgcagcagtccgcggggtacgttgatgcttagggattcgaactctctatgttcagacattgaaccgtcttgcttccctaggtctcgggctggggggctgtatacgacgccttgctgcagatttggagtcctgacatccgcgcaaaccaaatgtcggacttggttggaggtgccgctcctgtgcggtccttgatcaaagttggcgaaggagttgcgaacttgatccttctgccgatcgaacaatatcagaaagacggcagggtcgttaaagggcttcaacgaggcggtaaatcattcgcaaaaacgaccacgctggaagctattaagatcacgtcaagattggcgacgggcacccaagtcatcctggaaaaggcggaagctgctctaagagggggtagtactgtgcctgttgaggtcatcgagaacgacggtgacgttcgacagagccagagccgatacgcaaaccagccgtccagcgcgcgagagggcttcactcaggcttattccgcattggcccacgacctcgggtcggccgcccagaccattcttgctattccgatggaagtgcatgagaatgctggaagcggagaggtacgttcacggcagtcagagcaagcctcattgcttatagttgacagctgtttttttttctcgttcaggccactggcaaaacggtcattcgggccgtacctcttgcagttgtgcagacgatgatgggtttgaccaacgcgagtcgcaagacacttcagggcatccggaatcagctagattcacaagtacagcaacagctgcaggaaaagtacaagtagaacgacacaccaaacggctatcccgtcacgacttctgacgaaactaacgacgcgtacatgtactgtagcgaaaataaagtggtgttgccattcttcacactagcatcatacacccctatactgtagcaggatcttcttttttctgcttgtatcccttgactttccaattgttcatcgcttcaggccagttcggaatgacgcctttcacctgaccttcatgggcgagcaggaccataatatcatcttcggccgataaacgtgtcagtcggcccatggccagactagcctgggcagggtcttcatgcatagaaatacgcttgccacctgagtctggcatctcgaaaaaaggtatcctggttcgtcggtcttgaccttgaggtgaaggcaccggaagatatagagattgatggtgtgcagtatctcccgcgaggagtatgtctagaacgatggtccaggtgggaagtcagttgcggttccagttcccggacggatcggcaggacagcctacaagtatcgggattcgtggtgactcgtgcgagagcgtttaaatgaccacgacaatgctgtgtatcggtcatgaccgttttggatcaggaatttgtgaccccgagcgttgcccgatgtgcaggaaactcacgccttcgtttacagctagccaaaaactaccgtctccaaaccagtccacagcgtgctcgaagcacgctagttgctgccattctctcgcaatgggcaattctccagctccaacggtagcggattcatctgaccaaggacctctttggtctggagaaggcagctcgaccagttgtttctcctcgagccatttctttggccaagacccgtttggatcttcgggatagccagagccgatcgatgctaaggaaccaggtcctaggatcaccttgaccttcggcgatagtgtgtcaagatcaccgaagtgatcaaaatgctggtgactcaggatcacctccgtaattttgtcgatatcgtaaccaccctgctcgagcctcttgatcggtccgggacctgcggttgccttgaacaattttttcagcatgacatcacgaatccgactgatccgcaggggttttcttatgagcgtctcgtagcttgggacaatcatgaagaccattccagctcacggggtagcgttgtcaaggttctatccgaggaaaaatcagtcaaggtattctgcgtcgtcgtcgtagccttcacgtctggtgacctgcctccattaaccccaagtcccacaacaaagcatgtccattcttctctatgagatacgaatatgctggaaccgtaagatcatcctttgatccgtgcacatccgcgaggataccagccggtgcggtgagctcgcctgtcggtatctggtggatcgagaccttggcgtcctcggttaccgagcccggtatggctttgaacgtgtatgtttccggtcgcactggttcgatcattctgctgtttccgacgtttaccggtctcttggtgtctggcttctttgcttgtatcgtaagtcaatcaaagtgaacgatgttgtatctttctcttgtagctgtaggccacccttgtgctgtcagctcggcgttcgtatggggtgatacatggaccgggagcaatcgcagttctgtcgatgacgaaagcttccattttgaaagctgacgtgggcatacatcttttcgcctagcgctacaagtacatttggtctgatacaaatttcactcggaggtcaactaaactgcactcttggataggatcatacctccccgcctaccttgaacatcggaagatacgggggcagcatcgaccatgtctgcgcttgctgtagccaatgaacaccgcaaacaccgcacagcgtatccggcccgtccggacccagcttccactccgacgtctgtgtgattccacatgaatggcatgacctatttgagacgtttgtcgagagctcggtacctgacaagggaaccgatccggcggctccaggttgccgttgaataattagacctgttgctcccatgaccgctgtcgaggtcatgtatgggaatggcatgaaaggttcatacgtcgacatccggtacggatgacgctgtattggtgcaattgaagcttgcagtgtcccagaggacgtggacctcaggggttcgtcgagcggaggagacgttgcctgtggctggctagcaggctgggctgttcgagccggagcggtaggggaggtggtttccattttcgaagggcgaagttgctccccagcttccgattcctgtccggccgatccgttggtgtctagattttcacgatctttcccttccttttccttttccgcagcggctgctttggcattcaactcgtcgcgtcgtgttcgaatgaattccatatccctagccgcttcctgcggggtctgtacgttcatcaccgaggtcggtttggccatcggtcgaggcgcattcagcgactgagtgacatcttccgtctcttttcttgtcgactggacggcttcgaccgacctcggcacgtcggtagaggtaccaagggagagaggttccaatccggattccagatcttgctcggtgatgacgagatcatctaacccggcatcggaagcgatggctgatagcttcaagacgatctgacgagacagttcggataatcgctgagcatcggtaggggaatcactttgcgctgtgagggggacatcgcgatgaaaaaatcagggtttggctctcgaatcaagagaggaagagggggactgacctgtaccttcagccagatcgcatagttcgtcacagtaggccgagatctgaaaacgggataggtcatgatcagcttcggtctccttcttatagcgtgggtggccgccgctcaccatctctctcgcatctactacgctgctgcccttctccgtacgctctttaccagaaaccccggtccccgccctagtcttggccctctttctaggtctatcccgatcttgctggcccgtcactttgtcttccgtggtcctctcccgcggcgagcctgtaccccaggatgagatcttgctcgatacgttcccgaatgacgagacagcctcgcccaaaatgcgcatcgaatgcaagggcgaagcgttcggtccccttgccgtcgaatcgaccacggtcgggagcgagcggtactggctcgtaccggaagcagtcgacaaatgcatcgtagctcttggggaacggaacgactgtgaatcccggggtggtgggaccgactgttcgaccctctgttccgaaagcgagacccgcccaagtgcgaaaccgcttggcattgttggactgacggatccgacttgtcgatcggaagcatgacgggacccgacagatcggacttgagaggagtcggcatcagtgtgacggagagtgacaggatcatcattgctgcgtcgaccatgcggatcgactgacgtagacgagctgtaggccgacgaccagccatgttcgactgaaaattgtgaaggttttgggaaatgaggattcgcaaagttgtggtgacccgatgaatcgggagcgagttgtgggtgaccccggacaacatctgcgtggtacgaaggtcgtcccggtccacttgaatcagggatcggtcctcgctccgagagaggacgaggtacaggcacgccggatgaccaggatggttggtaatttcgggtgtccgtcgggacggacgctcgatgggtgtttgaaccggattccatggcgtggccgaatccaccctcgatatccctgttctgccacgagttctgccacccgccgatgctgctgccaccgtgatccagcgagttcattctcggtgcgggatagtcgagcgggcgtctcgaggacctagtaggtgacggatgacggtgctggaatgatttaatcgggggaagggtgaataggtgcttgcgggtcggtgagggctgagagctcgaggtatgtgttgctccagttgtgcgatgagtatattgaggatcacggtggtggcgagaggaagcaccgattgctggggtcggcaggcggtggtcgtcttgataatgctcctgctcgtgtcggcgatgatgatgatgactattatggtcaggaggtggtgaacgagtgacgatgcgggggattcggtccgaagtcgcgatatgacgatgtatctggccagaagccgaccccgtgacccggtcaggcatgaccgatcgaggaagggggggagaggtgggtgaattggtttctctccttctgtttctgcgtcgttctttgtctctgcctgtctctctcctttgctgataggccgtctacagcgcgttagcttgcctcggtcgatgtctgatgggcgttagtggtttatcccctggggcgtccacaaggcgagagagagagagcgtatcgacagtcgtccgattcctctttcgcctttggaataggaacagcctagaattcgatcgggcacgaagaaagcaatgaccgaggcggggatctagaggggtctctagaaggagggagggaagagtggaaccgaattcggggatctggccgcagattatggaaaggcgaagaaacgatcaaatgatgggggtttcgccgaaatgatggaaggcattcgttggcaagttggaaatcgatcgtgccgtggcaatcgtcattggggccacggcctggcagcagacagggcccggagccgaactgctcgcgatgactggagggttagttccgggcgcgcgaaacgtgaatcatctagctgctcgggcgtctgcattccgaatattgtccaataaatcatagccaatggccgatgacccgctcttgatcgggaacctgcttttggccgatattcaccgctcgaaagatgccagcggtagtacttatgggtcatgatgagatcaggacctctgggtcgagtggatcgagaatcagctcccggaggttgtccacagacgtcatttcatctggagatcttgctcgagcgacattccgttccttccgttcgggaagcacaatttccactagtagtactagtgctaaaccacgtcgagtttcgagccgaagatgaagcggggatgcccagcaaacgttgctgggaatgcctgtgccaatggcttgcgatatctagtgtggaaccaggcgggaccgcaaataccgcaagacttgtgcgagctcgcccctattgagagccaagcatagtaggttcgatcaagtttgctgggtcaagatcgccctccctgttccacaatgagacgcggcgtctgctggttcctggacttggccgagacctgtgagcatgggacatctcaatctgacgttggccacggcagtctcgtgcgtgataggcaaacagaccccctgcataggttgtttgctgttagcgatgtcgcagaaagagatttgcggttacggaccagtcgactcatcgccaccctcgctgctggatcactgatgcacaaatcgacaaatagagggcagttgccatggtgtcgacttgtgtgtacctgccgttgcaccaccacttcatgcggaagacaagggaacgaaagagagtccgcagccgatctcaaagaagccgtgttcacgcttctcgcctgtcgctcgcgatagcggtagggcatgtccgcatatggcgcaagccaccgggtgaccatggaaaagggaaatcgatcgactagtcttggtacatcgccatgattgtacggaatgttcgtctcgcgttatagattttctggagctcgccatcaaatccctcggctttgagggcgtacgagcctcgaattttcctcgtcgttgagtctcgctcatctctcccgtcctggacttcaataggtacgactaagacgtcatagggcactgggagaggagacgcctctcgctcgacttgccaactcaacgtccggactttaagagcttgttgagcggtgcagtcgcagaagggaaagggatcagagaacggagcaggcagtgatcggacgtcgctgggaagaattcgaaatgcgcgacgggcgctgaagtcggggtcaggggaaggcgtcgacccttgctccagctggaacacgttcatccgtccccctaccaatagaagtgaacgatccaatcacgattttgagtcttccgatttccgcaacaaggccagcgatccacgcgccggatgagcggcctgcccagctttccgaagcgcatagcaaacgacctgaggcttgttggacgcgtcattaatcgacagagaaagttcaaggtgacaacaaataaccaactgagaaatatatgttgctgcatcccacggtgtctctgcgaacttgactctgtcgaagcctcctcggcgtgtgcccaaagtctggaggagaccaagagccttcgaacttgcccctacagttacccgtacgagtacaggctcaagcacgactttgtccggacagcggtatcaacctgagtcgaggtgcttctcgatgcacaggcaacgaatccgaccctatgccaaaggctccagagtgatccgagcgaatcgttaacctgtcgagatgaaacccgtcgctcgcgcatcgcgagtcataaggagcgatcaacgccgaacgctaaagggatcgcagaggagcaacgctagaagttgctcgaagcgagtgaagccttttttaatcgcgacattacaacgcgaagagtaccaaatcccccttgatctcgcctcgccatcattaccggccgttccgcggacgtcagcgtgtgcgtgcgtgaaatcagaatccccgcgttcgctctcgcctctcggcctagcctagccagtctcgagctttgaatatgaacaagggcgagcttcgacatccttgacgaaattgtggcgatccgatctacctctttcatttgcttcaatcaaaccacatactatcaatcgcatatctcaagcctactccatcaacactacttcataatgccccgtcaatctcgttcttcccgacctaccgctcgagctgccccggctcctgctccttcccaccagcagacccgacaggcctcgacctctgctgccgcccctgctggatatggtgccgctcctcaggccgccatgggtcaacagaagcagcccggtatgctcgctggaattgctagcactgccgcaggtgttgccagtggaagcgtgatcggacatggaatctccaacatgtaagcacgactataggcttgcgatcaaagtcctcatctggtcgcttcgatcgaccaatgtgatggctgacccgctctgtcgtatctatcaggttgtttggaggttccaaccacgccgccccgccaccccccgctgagctccctgctcagagccaggcccctgccaacttccagaaccagtctcaaggtgctgcatgcagcatcgaggccagggacttcactaaatgcgtaagtaatcccgtccgttgtgtgtctgcatgaggatctagtctcgatgctgatctagaatggcgtgcttgctcttgcgatgtttgcagttggacgccacgaacgactaccagtcgtgttcttactacctcgaggctctcaaggcttgtcagcaagccgctgcccgatactaggctcttctcgtcgatccactatagaaggcctagcaggaggggttgcctgaggatggatacgcttatgaggcgtacatcccatagggtctagcactagcatgtcattgtcaacaagtaccattataagaaatcaccttcaccgctcgtcattcgtttcccatctccttcgccattgtgtcttggtcgattttggttgccgtgttccaggcgatgtgtcactcactgcttgatcgccctggttgatgaaaggacggcctggttggccccttgtttcacattaagcagaacgtcttttaaattcaaggccgagtggtttatatgcacccgtctcgatcttcacgatcgatggcgatatcataccaccgatccgttccgtatctgtcggatactcacgagccgaacgctcctcactatcagtctccacacagtgctgctggctcgccaccgtgaaacacaaagaatccgccgctatgttccccacgaccctcttttcgcaacgcacgatcgccatctcagtcttgaccctactcgtcaagtgcaagcagagcgatgcgcacttgacgctttccctctcggagactcaggtcactcgaattcagcccatggtcgatgcgccagtgcaagggatcgtcgctgctgcaggcgctcctatcgatcctacgggcgcagatgcctttttggggcttcagaatgaaggtagcgtacttacagtgagcgtaggagttggagtaggatcaggtggcgggacttacaaactcgttgtcgattccggagtaagtgcacgggtgaatgatcgggatgaggcaccaaattgtcgtctgctgacgcaacaggcccgccccccgcagagcccaaatttctggctcgctagccctagttgtcaaggatgtaaaatcaacagtgccgtccagcgttacactcctaacacaacccaatcctaccgagaggcgccctacggcagggcatctctaaaatacggttcgtctgtctcgacgttcttaacctcgcctgacgtgtttatcgtatgattgaggcagctatcggagacattgcgggtagctatggtaccgacactttttcccttggagatcgtcaagtctcgaatgtcacattgatatcggtcgatgaggcacgtacctggctgttcgataccaaggaccaagacgtcgtaggaatacttccgttgggtcacggtgtgggtagccacgacatcgaatttgtctgttatgcggtccgctgaccaaagggcctagggatttttcgtgactatcaggctttgatggttcaagaccagaacggacagactgtagaagtacccacgcctctgcaggctctcttcaataatggtagcatagatagccccatctgcggagtgcacgtgagttctgaaaaccctcaacttaccatcggaggcgtcgacgagtaagccagaactttgtccgaggcaagatgaccatgtcgctaagagttgtcgcgcagatctctaacctggaacgaggcgggcaaggctgtccttccgagcatgacggacgagtatcactatcaagtaccgttacaaaacgcgctagtgagatccaatgagacggtcgccttcccgaacgacactgtcatcttcgatacggcggcatcccacatctttggcccttgggatgctgtggccacgatctatgaaaagataggaggtattcgattccttttggaatcgacgcctgaacgcaacctcacactgcccgccctaccgtgtcaagggccggagaatttcagcttcagcttcggattcggaggcaaacaatttcccgtcgcatacgaggcccttgtcaagtgaatttgagcagtacagtcgcagatcaacggatcgcttgctgatgctggaaatttgcatatcagcacgaaatctcccctccggatttacaaggatggacagcttgacatgacacaaaacgcgaacgatgtgtggtgcaacggaaacttacagaacacgagcagtgagtggtcgcctagccaggtcggcttcgaattgctcacccacaaaattggcctgccatagtgtttggatggactagccagtatgataacaaagatcgtcgctggctcatgggcttgccgttcctcagaagtgtgagcgccctcccgtcaacttcggttccgtccaagatcagccgaagcgcgctaatcgcatcatcggcggctgttggtcacccgccgatcgtgacaggtgtattccagttggaattttgacaatggcgaggtgacactctggcctctcgatcagagcgtctcgaccggtggcaagtcgacggaatccaatacgacgtctgtccaagatcctccagcgcctgctagcacgaacgagaccctagccctgccacaaaaccaaaccgctcttccggtctcggatacgacgacctctgctcaagcggccatcgcgacaagcaatgcaacggccgagcgctcttcgcagaccataccccgtgccaatatatctgccaccgaagtggtcgccagtcagactctgacgatcactgaaacactggcgacggtggcgacagctacggtaaccgagaatgtcgcctcggaccccgcaccgacatctctgaccagggatatcgcgaatacgagctcttccacgctttcggtatctcataatactggtgttatcgaaggatctacagctaccgcagcgaccacgtacgccgttcccactgcgctggccaccaaccgaaaaaggtggggaagatcgtaatttgatgcgcatattgggatggaagcaagggcggctttcttgagtacctgatatatgggcgtgattttatcgtatgatatacaacgtccttgacctgaggatatgcatatagccgccgagaacgaatgccctgctcgcgaagcggctctggcacgaaccctcttccgcctgagctttgctaagaaatgtgccggagctcacaccgcgttagacggacgccgcatctcggccagtgacgcacgccaggcaaatcgacgtgccagggactatctgcgctgtagctgatggacgggggtagcaggatatcctgcttgcgatgcgttgattatgcctcgtgtgcgcaacgagcaaaaccagtctcttcagtatgcgataattctgggtttcgcggacggaagcaaaagggtccgtcccacgcgcgccagccgatcacacaacacacaccccttccggagcggtgacgagcgatgatgagctggctactagctgctgggttcccagcgagagagagaaaaaagactcaacgacggggtctgatgattacggccattgagcgtgaggtatgaggcaaaaccggtttcaggcggcgatatgtgatgcgagatgaccggtgacgacttgtagtatttgcacgggcgatacgactcgtcgaggccgtgagggtcgggccgctcttacaaggtttcgagaacacgaatgacccgcgccggtccctgacatcatggcgaaaggagatctccgcggaaagagagtgaaaagatactgtagcggttctcgtgtacttttggtctcttttccgtcggaactaccggccatagcgtgcgacacggctagcatttgatgggggcatcccgcacatcttgatatgtatgttgtaacaagtagcttgacgttgggccagagtaaaggtggttgtggaaagggacgtcgctgcgctggagggtctagtggggaaagggggggtgggtgggaggggtggcacgcgcgctccaaagcgaggcagctccccgataacgacatgcctcccttcccttagccaggcctcgagtctcgctcgctctggctccgtcctcgccgaacgtctctgccctcctggtctcgttgaatgactaccgctcggcctcgtaccgtatcccggctcacaccttgtcatcagacgagaccagactatcacacttgaatctggatgagagcttgagccactcagtagagaatcgttagagatcatcctcgggaccctcaagacggatatcccacgccttgcacgatccccgttctcatcgacgtcgtgggcgaggatcgagccttgttcccgtacccaaacacgttcaggtgtcgacgatccgaaccgacgaggatacccggcggaccgtgcattcttcgtcttcataatcctagctacatcgttcttgaccttgacgagaatcgacatggaggcacgcacctgattcaggccgaccgagacaagacgcatcttcaacgactcgtcgggaccttttgatctaccgagcgagtcttggacagaaaaggccacctcgctcgccataccgtcaggactcccgttcgacgatatcatcggcctcctttcgcctagcctgaccgtcgacagactgacttcgggaaaggctgttctatcgggaccggaccagagtgactggcgtcaccgagacttcggctcgaccggtcaatgaccccaccagctcagactgggatctacgcaagaccaaagtcgacgatccagcaagtccccccttctccggtgaccttgcaacatcagcagcatcagcattattacgacccgtccacctatcccacgaggcatccgacagcgacacctgtaccgactcaggctcaaacacccgtcctgggtagtcccgccaacaacgtcccgccctcgactcctcatcggcaaccgactcctcgtcaaaccccttcacagcacatgaatgccctacattcacaagctgtacccgtacaaggacagatgatgcaagctggtgcacctccagggtacaccccgacccagcagcagcggttcgcgatgatgcaacagcatcaacagcagcaacaacagcaacagcagcatccgggtattcaacagcagatgcagcatcatgctcagatgcagcagcaacaacaacaacaacaacaacaacaacaacagcagcaacagatggctgctcatcaacagcaacagcagcagcagcaccaggctcagttggcacatcagcagcagcagcagcagcagcagcagcaacaacaacaacaagtgcaagccgctcaggcccagggtcagcccgcccaagcacaggtccggccgagtcagacgcccaaactgggtcaatctgctggggggagtcatgcgatagtgaatggaaacgtcaatgctgtcgctggtccatcgaaccaggggtaccagaccgctccatcgaacgctcaagggcaactgccgaatgggtatacacaggggagcagcgagtacgagcagcaacgtcaggcccaacagcaacaacagcaatcgggtcatagtcaggcccaggctcaagcccaggcgcaggctcaagcgcaagctcaggctcaggcccacgctcaagctcaggcccaggcgcaggtccaagctcagcaagctcaacaggctcaggcgatgcagcaagggatgatgggaatgggcatggcgatgaacatgaacatgacaccgcaacagcggtcggccatgctcagacaagcccagcaacagcaacaacaagcggggcagcagcaacagcaggctctcgctttagcccaggcacagcagcaacaacagaccccattgcaagctcagcatactggtcaacagcagcaaaccccgatgcaggtgaatggaccgacccagggtatgcagcagcaagggtctggtctttcgggctacgggattgcgggatccgcccaggggagcgtagacgatgacaggtggaacggtgatcacatgttcgtcgatggagaagtgatccgatttgtgcaaccgaccctaactgattggctaccactttcctaggctacatctttacatacacgactatctgtcaaaacggaatttcaccgcagcggcacaggctctgaacgatgaagccagcttgggaagtcagaccgtcgtcccggtcgacgcgccccaaggcctactgtatgaatggtggagcgtcttttgggacgtgttttcggctggcaatcccggaaaagccgggcaaccgaccgccgatgcacaggcgtacatcgaggtcagtcacttgtccccatccgcgttttaacatggtcctgttcctgactcttcgatcacaatgggcccatagtctcaggtgcgaaataaattactgcagcaacagcaacagcaacatgcgttgggtatgggtcgacccggccagccgatgacggcacagatggccaatgccatccggcaagcttcggtccaatctcaaggtggctttgtacaccccaacggtgtgacaggatactcccaagggatgacggctcaacagcaccaatacctacaacagcagcagaacgcaggaatcacgcgccctgcttctgcagcgccgcagcttcaacagcctgggcaggtgcccgcaaacctgcagcagcggtacatgtcgcagcagcaatctcagagcccagcgtcgcctgccatgacagctcgatctggggcgatggcttctcagttgccgtctaggcagcagtcattacctgttggggttgaaggtgttcagcaaaacgggcagttttacccacccggttcgatgcaacatatgcagcaacagcaggccaatgctcaacaacaggcggcacagacggcgccctctcctcatttgggagctcaacaaatgcagcagcaaaaattgctagctgcacgaaacccaaatggtgctgtcaatcgagcgacgacgccgctccagcagcaaatgcagccgggtcagccgggctatcctcagcctggacctggtccgatgcagggtcaagttccggcgacgcctcagacaatgcaattacaagctgaacaacgagctcgcctggcgctgcaacagcagcaagcgcagcaacagcttccgaacgcccaccaacagcagttcttgcaacagcaacagcagcagcaacatttgcaggcccagcagcaacagcaacagcagcaacaacagcagcaacaacagcagcaacatgctcaacagcaggctcagaatcagcaagctatgcagagacagatggattcgcgcttccacatgttcggttatggaagtatcaacatcccgcttatggcccaggcccttagcgcaaccaacatggaatcacggaatccagaaaatatgagccctgttgagagagtaagtcccgcgtcgaccttctccgcagtgaccagaacggcacgcaccgactgacccaccgcttgtcttcgcaggaccgccttaaacatacctatcacaccttcctcgttcgtcacgctcaagcgcaaagcgcaatggctcagaacccaggccaacagcaaagcggaatggctgtgcggcaggcccctccgggtttcgcacaaccaggccaggagagtgttactgctataaagaggtgagctcggaacacagtcgagttttctgcatagaagctgacatgcaatcgcgtgatgcaggccaaacggtatgcaaatgacgcctcagacgatgacacagaaccaggcacattctcagcaggtccgttcattgccgattttgctacgcgaaacacaatctcatcgaattgaatcacagcgccaggccgaagaccgtggcatgtcaccaccagaccgcaaacggatgcgtcgcaactctggtagcgcggcggccagtccttacggagttcaaccagagactccgcaccaacaatctacaccgcatcaaggcagtctgccattcaatcaggccatgtccgtgcaaacgcaaaaccaaaacatggcacaagcgtcattacaggctcagcagcatgcgcaacagatgcagcaacaacaaatgatgcaagctcacatggctcacaaccagcaatcacaaccgccgactccacagtccgtggcaggccagaacgatgatcaggtaagccgtgcgagactccgtctacccaggcgcaatggattgacgataagactcatctactagagcatgcgtcagtatcaacatcgagtccgggagcaacagttggccgctatgagagctatcaagtcgaacgaccacttctctccgagtaatcagagcaatggacaggtagtacaaccagtcgtgccggcaacgccacgggaagaaatagatcatgatagcgcggctttcggtcagcaggtccaagcgacgacaacagcatctacgcaattgaatttgtcgcaggcgatgcaacgggggcaaaacaagccgggccagccgggtcaagtgcagtccgggcaggccccgcaaaacatggcaactccggcttcaccgtcgatggtagctactccgcgaccctcgtcgagacacagacccctcggcaactcggttcaagagggaaagcaggatgacgcacaggtaagtatcgaaaggcgagttctacgcgatgaaactcaccccaatgccgcttgatatagtctcctgtccggggttcaggctcaggctcatctgagagcaagacaccttctcctcaaactgcggcaaatgcatctttcagcgcgaacctggctccaagtagccacggtgggcaacagagcaatgtaccttcgccaggggatctcgcggcggctgcacaggctcaaaatcggccgcaggatccagggctctcgacacagtctcacaaccaagggatgtctcagcaggctggaacccagaaccagcaggcgatggatatgttcgggggcatcgacctctctggagtcgatcctgccttccttgagggcttgtctcacagcggaatggatatgggattctcagacgccgacttcagtttcaacgagtttctcctggaccccgcgatgggggatggagacggggaccctggcggagactagtctctgacccttttccaacgtctggtccgacgctatatactatgaacctggctcaagctcgctttagctgagttctggtaacctttccgacaacaaaaggatcgcttcgacaaggttacatgcgcttcgcaacaacaggtgctcctcttatcccaactaccgtatcaacgatctattcgcggctttccaccggttcagcctttcgatacctcacgacccatcgacagattcttctacctgacttgacaactttcggcatctttggtctctttccttctggttattccgctgcgggacgcggtcattcggcttctcgccagcggtgtattgacttcgcccacttctgaggcaattgcctcccttgctatggacccataataattccctgtctacgggatgtttttcattcccggagaaaaaatttccttgtatccacgcttgtatgtatacggaaacatcaccgataagaatcggatgaacgacaacaaaagggtcggtctacgctactgtggtccaatcgtcggagctcgatttgctggaattgtctcggcgttgcaatgtcaggctcgcgaagttcaccgaattcgctgcctccacctttgcgagtgtcccgcatctcgatcttacatcgagcttgttcaagtaggatcagtcttgctgaattgagctgcgccgggtggcgagtggtacgagtaggtcgactagcgtcaacacagtttgtgtactctagccacgccatcatatagacggatccattcagatagagatcgcgaggtcaagtcatgcgatcataccgggcttgcttcaaggcaggctcaggctcaggtacggccacccgctcaagctgtaggaatatcgcaacgagtgccgtccttgcaaacaaaacgcagcctggttctgttgatgacaaaatttcgcacccaagaaccgaacttgatccgggtactgctgggctactggatgatatacaacttggaatgggctcaggccatagatctgtgcggcgcaagcgaccactgatctacggagacgacttgcctaccactcaggacgtaggctctggatcaggtcgcggcgctcagcagctagcacgagaggatgatgccgaagtggatttcctcgcaagcatactcatggatgagcctgaggagcttgaggcactggacgaggtggctagatacgctggcgatgatatattcgctgctatggctggtagggacggggactcgaacctcgtattcgagcgagaggataggctttccccagccgcagcctttggctccaaacgtgtaggaatggtagtcatcccacaagaactcaacaacgccattcaagctcgagtcgatggtgagtctgtcgattggcctgtcgcatgattctcgtcgataacggatctcttccagaatcggacaatcgcaaactattacgccaggcattcttgtccaagatgtccatcgcaaaatcgcctcgatccgtgcccgtgccccgcggttcttcaaaaagggcccacctttcctcgtcattgcaagagcataatgcgtcccctggctcgagctcgtccggctatgtcaacaggcgaagtgaatccgttacgcccttaagtgcgttgcttagtgcgatcgtggaccttcctggagaatatgccgctgtacgcaatgttcttcgagaactaaaaagcagagttgggagcagggaatggcaggcgatgagcggcgcatcggctcctaccggcgacgcggacagaaatggccgatgggcaatcatcgatggcggagcaggatcgggtctttggtacgtccattcgagtctgcatctcctagatcgtgctgatggttgtgcttggcggacttagggcagtgcaagatactctcggatatttacagtcttctgaaacgtttgatgtcgacaaggtcacatccggtctccacctcgacgttgttcatggctcgcgacatatccttgagcttgctcaaagtctcaccaaacgtaagccaatgcgagattggggtcatatgcaatggcctaatgttgactgctgccaccttctagaggccgatctcaagggaaacgtcaattttagcagactgtacaagccaacttctcaggtgagtagaagaatggctagctcacatagatgtggcaaacctgacgtcgactccaccttttagcctgctgttgttctcgcgccctactaccttagcaaattgccgaatcaggttgcaaggcggcgcaagctaaaggaactgtgggagacgggcgctgagacgatcgtaagtatatgcatgttcgcgacaggatttgtcgtaatcatcacctcccctccttatctctcagattctgatagacgatgggtcaagcgagggtttccgtatgattgcggacgcccgacagtatctgttggatttgggacgacagacacctgtcggtgcagaggatcttgaaccagaagagatcggacggatcttgctccgagaaaagcggaaagtcaagaaagctcgacgaaaagcacgagacttttccgcagtcggaggaacgttggaaatgatcgatggcaaggaagtattgcggataggcgatcaactgttttatccggaactcgaggaagggatcgacagtgaccaaccacatctggaggcagaactcgaaacagttcaagaggagcctgaagtcccggttcctgagccagtattatcaagtcgtttcgttggtagccacgtcatagcaccggtaagctttcgagttttgtctgctgactacatcctgtatattgatttctcttgcaacctgttcagtgtccgcacgatcgagcctgccctttgctgtcaactcgagactcttgtcatttttcccaacgggtgcagactcctcgcttcgctcgcaaaacaaagcacagcaaaagtggtgaaaacgactcgaactactcgtacgtgatcatacgacgtggtcgcaggcctatcgccgagacgtctggcactggtctgtacggtggtgtcgccaaagacgaagcagagcgacaggcagcgaaagaagatagcatgcagcagggtctcattgtacccatcaagggtgcccaggacgggaatttcgaggtcatgcgttatatcccgcccaaaacttcgacagagccgcccgagcctgccaacgctcagaagcgctcacagactgaagatgacatgcggaaagaggcctatcattggcctcgattggtttacccgcctttgaagcggtcggggcatgtcgtcatggacacatgtcatccttcaggcgagtaccctttcagccggtagatggtagcggcctacgaggctgacaaattctcgcactcgacaggcgccatcgtacggcaaacagtcgcaaaatcaaattccaaacaagcatatcacgacgctcgaaaggtgcaatggggtgaccttttcccgcatccatccaagggcaaggagacggtacgcgaccgtgggatcaagaggttgaacaagatcgaaccgttggagggtgctcaagcagccgaggacgacgatctagccgacatcgcggttgaagaagattggcccgttgctaaactggtcaacgtggaacaaaaggaaggcgacgtcacgaaccctgagcaggagggcgatgtgattgttcgcacctatggtcaaacctaaatgtcagggacccgtcatgccgtatgcacatgatggaatcagcttgctcaaacggtcaaaagacgatcgtgctggatctcaacggctgattgctgatacggccgaggcaatcaggaatctccaggtctctcagacttctcggcgtttcttttaagagtacgacttgcgcctattcgctttatgatcgtatgagcttcttgcttgtatcagcagcatgggcgggcggtctttcccaagaaccatctcatcttgatacgttaaaccttgttccgaccacggcgtagggtagagatgatcggtattcttgttatttgtttggttccgtttcggctgacgtcacgacgaaacgggggctggacgggggcgacgtaacagagttcgggcactgttcatccggaaatacgacgcctacagcgagcgattcatggctgaccatgatgagcatttcttcgttcccatgcatgccttctcttgtatttagctgatgaccgactacgcctaacgagtctgacagtgcgtattgaagaattgacatccacgcctctccattacgaactccgagcctgacctacacaaaacctctacaatcgataagcaggattatcaaatatggcagacagtaaaggtagcgctgtaaaggaccaggctgtgcccactttgggaatgatcggaggaggtgcgtctttgcgaatgttgcatgtcgagtcagtggctaatgctcgatggacatgtatcgcaggaagcatgggaggcggttgtaagtgaagacttgagacgcacggtcatcgacaggggtgatctcagccatgacgtttacagggagcctgaacgcagccgagcaaggagattcagtggttatcgtacgtcagcccgagtgagcagcgaagtcaacctggtattaattcacttgtgtctccttgcccagtatgatactgtgagtaccaagggagagcacggaacaactcggtattcgccttttcctgagaacgcgtgtcgtctagtccgatgatgccttgaacaaagcagtgcaggacggcaagaacatcggtattcatctcatccgggcctcttccttggaagacatggtcgaatctttcgacaccgagaagaatggacccagggtctttgtcatgagcttgccgcatggtcccgcagtcgacaaggttctggacgagcttttgcctctgttgagcccggacgatatcgtcatcgatggtatgctcaatcatgtcgtcatgtcggcgttccggagtggccagctgacccaacgcatccaatctcaggtggaaacgagtggtgggaagaaaccgagaggcgacaaggtaaatgcgtcaaccgcaacattcactatgtgggtaccggcgtttccggaggctatcaatcatcccgccacggaccctctatttcgccttcgggaacacccgaggcttacgccaaggtagaggcaaagctcaagaaatgggctgccaaggatggcaagggcaatccctgcgtttgctacgtaggcccgggtggttccggtcactacgtgaaagtaagcctaggggttttgacgttccaactgttcaccatggttgacattgccagtccattttctagatgatccacaacggtatagaacaaggtcacttgtccatcctggccgaggcgcactacttgttgcatcacacagcgggtctggagaacaaggccgtagccgatatctttgacgagtggaacgggacgaatgtggcgggtaaagaggatgctaaggccggcgagggagaggaggggaaagagttgtacgacaactttttgctcgaggtcagtagcgctcaccagctttgcctgaaatctcatggaaggtcttttgctaatttacaaaacagatcggagccgagattttgcgcttcaggcatggagatggccttgacatgaaaaaagggattgtcgatggtattgaagacaaagtcacacaggacgtcggtgcgtgaacaggagaacccttcatattgacaaagtaacactcgattgacagattttggttccaaacagacaattcggaagggaccggagtgtggacgttgagggagattgccgggcgtcatgtcgcagcgcccaccatcgccgccgctcaccaactgcggatcacgtccgccttccgtagtcagcgtctcgaggctcacgaagctctcaagcttcccctgcccaaggagatgggacaggacgagtcgttcgaccaaaaggcgttcctcaaggatttgaaactcgcggtctatgctggtattctaggatcctacgttcagggcatgcacgtgagtcaagctcgtaactcagctggtgcgcctagctaaaccgatgcctcggccaaagatcattgctcaagcgtccgaagatcagcactggaacatcaactatgccaatgttattggcatctggaggtatgtgtggagggttcaagacactgccgagctcgcggcttactatggctgcctctccacagagccggatgtatcattcagagcgacgggatctcggacattttgcaacccatctatactgaacaacccaagctgaagaacctcttggcttctcccaagatcgcgcaagagctacgaaagtcctatgatgcgttgaaacgtgtctgcaagatcagtctcgagagcgatgccatcacacccgcgctcgacgcgaccctgtcttggttgaaacaggctgggtgtgactcgttgccgaccagtatgtcgaggccgtgaagggtttggttctaacctggctgatttatccttgctcgtcagactttgaggaagccgaactggattacgtgagtgacttgatatcgatgcttgtttcggtcaaatcactgacggatctgctttgtatcgacagttcggagatcatcaatatgataccaaggtgagatctgggcggagtcctccatatacgccagcaaattgacatttcgagctgttatcaggacgaagctgctatggatcctgtcaagggcaggcatcatacggaatggaaggtccgtacatcgtggatatcgaataataagcgatgcactgaagacccttgttcgccatagtccacataagcggagaaatgcgcacggttcacgactttcgcctcaagtgctgtaacccaaacttgtatccctgaaaactatagaatctgattgatgttgacgatggttctaattccgacatgaccgggttgcgacgcagaaatgaatgttcgaggtcgacttcccgatattgatttcagtagaaatctgttcgtaccgaccaatccgatggtcctcgacaagatcgaattttgaccggtcgagcgccgaaaactggccacatccctattcctgtgttcttagtagcggtctagtgcgaaatacatttggtggcggacttggtggattgcgacgcatgagtatgacatgtttggctcgggaaaaagaaacttaagggttcatggttcgtccttgcgagatcagcctggcctgtcgacactggtcggtcgatcctcgccctcgagccgtaggcgactcgttgatttgtttcacctctgatcgcttgaccacctcaaacaatatcctgccagatctcatggcgtttcagccgaccgaacgaatctcgactgattagcgaacccggtgccattatactgtcgttcatcattacaattcgttaaatcggtgctctttcacttcatctcttgcgccgtgctactgttcagatccccttggattgcgctcttctctcttcctcccaagcctggatgacgcccggattgatcaacctccgatcgtctacctcccaaccgtctgcgtcgacccaactgggcgtctgtgccctacacagcgagtggaagaagtttttcaggtgggaagggtaggcgaatacgttgctcggcggagcaccgccgctagggatcagcccgcgagactcggatttgcggatctacagaaaaaagagtgccgttgctcatatcagtaagggacgattttccgtccccggatgtagggatcactcgcctgctcgatcgttgtcgagttcagaaacatcaactgcattcaagcaatatcaagagtaagactcccatcgtaggaactcgcacacgaccgcttgaactcaccctcaagtggtatgccagcaatgccattaccggccagacgaagactacgcctatggcgaaactgacggcactgcccggactatcccgaagagcagctccaaacgaaatgttccgacgcgaggtgattatcctgtaatgaatggccgagaagacgatggtatagatgagccctagtacctgttgagtagcaagacgatcgcgttagcacaaacgttacgagttcggtatcgccaggcccacacacgcacggccgtgatgagaaaggatatgaaactgctgtaattccgtttgcctacgcagttgtgtaggtatgaacaatggtggtcgattccttccacgcagttgccgcactaggaaacctcgacgttccgatcaacctgatattctcgcttggctggcgggagacacgcgctcaccaatcgacaatgactgcttcgtgggggtcgatagattttgcacgtctcgcagtacttgaccgtgacggtaccgtttttgactcggaggtcccgcgtataaggtaccagagtaccagtcgacgaggtatgagagacgggaaacgtcggatcgagatttcttggcagtatgcctggaaccattcggacggcgagaacggtctcagcacactctcggtggggtaaagtacgagatgcaaagcgaacgaccgacctggatctcggaacgccgtggcgatcatggcaccgatacacgttcctaaaaggtaggcaaagatgatcactgccgctttcccgcctgctcctgctcctccaccgccgagaccgtccctccacatccagacccctgtggtcccgagccacagtccgccgagaccgagcacgaggacgaacgaaccgatgagggggaggatggaatctcctcccgtcaggagccgaccgccgaggaagtaggtcgtcgactggagcggttgcgcttcgaggcgtttgtatttccgcagagacgtcttgcggcggtaaggttccgtatcagaggtataagccggggcggatgtgtagacgttccgaggtgtcgtatttccaggttccaggttcgtgaacggtctgccgcgagttgacaaccggttgaggtcgtatagacggggcgcagcggtgacgcctagatctgaccctctgtccggaggatactgatgtgcgcggtggtccggcatcgagggcgccggatgatgatgttggtacgctacctcgtcgttctcccaacttctctcgtgccttggggtaggatacactgcttggtcgtccccggtcgacccgaaacccaaggcctggaccagagacaatggtatgccctgcgcagcggcatccccattcctcgcgaccagcctatccgtactcgcactctccctcgggggactcggccatccgaccgcgccttcttcttccagggtgctccttcgactagcacctagatctgaatcgtcccgcgggatgtaggggacgccatcaggactggacaggtcgtgcaacctcggtccgtccgtatcgaaagagctccttgtgggcgtcgtatacgatcgaacggatctttccgggtgatccgtgcgtgccgccgtttggtgaatcgagggatccatctgggaacgatcggtgaatcgatgttcaggggggtaccgctgtgaatggttgtccggggataatgcccttttcatgggcgacaacctcccttgacctgaccctggtcctcccgttcccctttccgcagccggaggtagcctggcattgaggaacactgaatcctgtgacccgttcgtcctcttcgtgttcgtcgtggcggtcgtcgtggtctgagcgtcgaacgggtcgtctcgtctgataggtcgtgaactcttcatgatgggaacgatcgtcgtgcgagcagtagtggtgatggtcgaactagtggcattgccggatcttgccgtacatctgcatcgtcaatgatatcaatacgctgtcaagcccactactgtcgaagcggcactggcatgtcatacgaccaggaaaagactagctacactactctacactacactagattacactttcggttgatcaaacttgatcaaaccaggtccgaatcctttttgaatcgatttgttgattttgtggaaacgcacctaagttgagcaaaagtagtatgtaccacgacaaacccatatcatgcataaagaaagaatcacgaccaccaaagactagatactggatacgtagaaattgaattccccgaggacgagacgagaccgcacacgaggagaagcaaagggcgggatatgatgaccgaccgaccgacggatcgacaaggggcacataggggggggactcgaagtcccggcgtgcatcgtccgatccctgatacgtcacgttccttctgtcctgttccgtttcattcccggcccatctcgtctcgtctcgtcctgtcctcttattctaccgagattttttgtgtttgtatcgttacatggccatcaagtttgcgaggagaccacggtgtcgggaggacaaaccccgtctgtctcgtaccttcccttctcatcccatcccctcgtcccgcgtcgactctgagtcgacctctcctccccgggggagacggggcgtcagggtctggacgtgcgatcgagtcgggtagaggcaagggtgaagacgggtcgttgttatgggggaagacaggttcaagcggtaataggttctcgacatccatcctggtggtctgacgttcgtgcatggccgtgtacgcctggctcgtattcgacgtggctgcgagctcgttcatttcgtcgtcgccgtcttggccccggatggctagccgtccatcgcctcggatcttcgtgccgctacgaaagggagtcgagggtgtagagagaaaggcagagaaaacgactcgagacgtacatcatcgagagactctgagaggttgggcgagacagaggtaggtcgggtgagttctctagacaggcacgcgtgttcgagggccggggccgcgagatctgctcactgtcgacatccatggcagacattgtttgatgtgatggtgatgagacgggttggcttgtggtcggcaattgaggtagatgataccgtcaataaggatatatgtgtgtatggaggaggtagctttgatgatgacggtggtgcaatctgtcgacgaagctataggtcgacctactcctttgtccgaatcatctacagcaggtcagcgatcacctcttggtatttgggccctgttggtgatggtactttgtcgctttctcacgcgtcacatcagcctcagcctcagcctcagcctcagcctcagccacgcccacgctgctgctgtcaccctcgaccaacctcctcctcgtcgactttccttctcgaacgtggaaaaaagggggaaaacatctacccagacaccacctcactcgtctcaaattttcatcgactatatatatatacatacacacactcatactcttcgtagacctagttcaatcccccacctagatcctctcctcttctctcgtctaccacactcaccgttgggtccacctaacgacaacggaaccgcgcggctcgtcacgctccgttctggacctcttcactgagcgtaccaggtctttcaatccatcgacgctcgaccaagacgacgatcaaaggcgatcccggaccgagcaaggatcaattcggcggtgtagcacctccccgctcctcttcgtctcgcgcgaagaagcacgcaagcacggccgcacggtctcgcgggttctcgatcatgttcttcctggttggtatccatcgtcgtctctccctacctcttccccccggtggtcatccgccgcgtcgtcacctcgacccgtgaccacctcatcccctacccctacccacatacacacacacacacacacacacgcatatatacatgctcgttcttcctcttgtcaagccagatcacaatggctgacggagaatttcgaaacgtcccatcccatctccacccccaccgacgacgacgacgatgacgatgaacccacgtcttagaaagatctagaacacaacatctcggtaagccagacatctctttctctctctcttccttcgtgcacatccccgctcaccaagaaaacgtcgtttcgattctcacagctccatccgtcctatttcggaccgaacatcaaggatatcgtcttgcagaaactccattccgattgcgaaggcgtaacttctgggcaggatgggtgagtgaatacatcgtccgcgacgacccgtccgtggcttccccggcacgcgccctgtaccctgtaccctgtaactctcgcgctgacgactcttccctatcctctccgtccatcccgtctcggcgcacacagttacatcatcgccatcaccctgttgaacatggattcccttcaatccggctccaaagtcatccaaggcacgggcgaggccgagttcaccctacactaccaagcgctcgtcatgaaacccatcaagggagaagtggtcgattgttcggtcgaaaaggtcgggaaacttgggttcttttgtttgctaggaccgatgcagatctttgtgtcgacgcatgtgagtggagtgtcggttcggttcggtccagtcgcggtcgtggtcccccacactgccgctctcgattcctcgtcctcgacctcgcgcatcgccctccaatgggctcgtcaaatgcacaatgaatgatgacaagaaagcatagggacatcttacccttccaccctcacgggtggacggagctgatgcaaacgtactgggtgattcaatgtagtagtatgaatccttttaaaatgtcctgacaacgtgcgacgaaagcgaccgtcttttacgcggagccgaaacgagacgagacgagaggcggcttgaaccggtcgaaaatttaccgaagcggaggatgctgactcgctctgtgccacccccctctctttccgtcgacagtacacaccggacgattttaaattccaacccgaggccaacccgcccgcgttcacctcgacgcatacgggcgagtccatccgacggggaagcaggatcaggttgaggatcgtcggtgttcgtggagaacaatcagatttcgtgagtctcgccctcgcgtgcctgttcctcccgccctggaatggtccgttgacatcccggtctgtctctcccctatgtgatcagtttgcgatcggttcgatcaagggggattatctgggcccgatggaggattagaaagacggcaaggaggaccggtcggtgcctcgcgttctcagcatgttggatttccatttgtatacgacaccaaacgacaaaagaaagatataaacaagggatccgttcgtatttcgaccgcagacggatgaaatccgcagtcgatgctctcaatgcttaagaatctagtgcccttggtgcgatacgccccgtgacaagtgtcatttctctttcgaggcatccgatgcttgcgttgcagtgctgcgtttgctctcgctcgcgctgggtacggggccatgaccagggaacccaaaggtgttggcaagtctgtcttcaacgcctttccacaaggagcccacgggggaagttgccttggacattaacgaacggccgtcttcatcgtcctttgccctcgccccgatatctgtgtctagggaagggaatgttgtcagttcggagccgtcatttcttcgcatcttctcgtattcttcttttatttgccgctttctttctcgctccttgctttcctcctcccttctcttcagggccgctgcctcctcgacagtgagtttgttccctttggctggggtgacctgcgacggcacagacgattcggtcgcctgtatagcagagccggtgaaaccatgcgccatgtctgatgtcggtgagtagtgattgcgcttcagtaagcggcaacttatccgtctcaaagggctgttgacccgctctcagttcacccccccaagtgtaatagctatgaacgtagctgtatatatatgcgctgatagagaagtcgataacctgcctgagggccgccaaagccggtcgacagaaggcaaggctacgagtccgccgatacccgcgcttcagtgtggcaaagaaggcgtataggggtaacggccgagagtagcgagttgtcaattcctcacacaagagacaaagcgatttggccggtagacgcaatgaagacgcttattctgcttctcaaaggacatgtacagcaggcaacccgtaccgtagaccgtccggatcccgtttagatacacgtctctgtcaagatggataccatagcttttgctgaacgggcgcatccgccatgtaagaggttgatgtctaatacaagttctcccctggcggcgcaatacatgatgattgctaggtctgatcgatggcttctaaccgctctacttggctgtttatgctgctcaataatctcccatgaatctgcgggaagcgccgaaggtcgagctcgacaccggtcgttagccttttcgcgcgtgggcttagaagtcgtacatccgccgccatatggcatattccaggtgacaaagacgtgcatcaactattcccgctctctcaactgtagatacagggcttgaacgctttcgaaacgaaatcggcagcgagattgcaaagacgatgatgtgcaaaagatgcggcactcacgcagtcggatatgtctatttcttcttgatgacgaagattggagtggctcggttatgggttaagggctagtcaccaacggctcattcgttaccaactgtaactttcccaccttattcgacgttaagcgttctgctatgccggccatgtgaatcgctgttactcatcctcattggaccgatggtgaaggatgcaccagtcataccagttatgccagttcgaatacgcagctgaatgtatgagcacgtatgtatggcatgtatgggcttgtgccgaagcgtttgcgacgcgggaaaggccgaaagccgaggtcttccacagtcagccccgcccgcacaaggccgaggacatcgaattatcaatcagaatcgagtcgacatccttgcattctcaccacacatcgctaataatactacacaagctagagtctcgcagcatcaccacaaagtcattctcgagacgattctcaacataaagccatcaatatatcgacaacttcagtcagtcctcgatcctttcatcatgtccatcaccgccagatacgcgattcgactagctcaacctcgacttgcacctcgtctcgtctcatccctcgttcacacatcaactaacaggtactcgcccattcgcatcaccctacaacaaccaaaccagcaccgcaccatgtcttctgccgcccagatcccttccaccatgcggggagttttggtcgaaaaggtcggaggtcccgaggtactcgacttcaagaccgaccttccggtccccaagcctggacccggcgaggtcttgatcaagaacgagctggccggactcaattttatcgatacgtgagtatactaggcgtctggatcgctcggaatggctcggtactgatgttctcgcccttcctcagctactttcgaactggtctctatccttccaaaaagcccgagatcttgggcaaggagggctacggaactgtcgttgccgtcggtacagacgaaaaacccttgcacggtctggaaataggggacaaggtcgtctggatgggaggatccggatacgccgagtacacctcggccccgtccctgcatacgtacaagatccccgaggggctggacccaaaactcgcccttgcttcctttttacaaggattgacggctttgagtttgatcagagaagctcacccggtcaagaagggtgaatacgtcttggtccacgccgctgccgggggtgtcgggctcttgctctgtcagatgctcaggaacatcggcgcgcacgtcatcgctacctcgtccacccaggcaaagctcgacctggccaagaagaacggggccgagttcctcatcaactactccgaggagcaggacctcgtcgccaaggtgctcgagatcacgggaggacaaggggtcgatgtcgtatacgatggggtcggtaagacaacgttcgaagacgacctgcaaatggtcaagaggaaaggatcgctcgtctcgttcggaaacgcttcgggtgccgtgcctcctttcgctatcaggtaggtcttgacgggaccgcttctctacccgaggtgccgaagatcatttttctgcgactgaccaccgacctcgacaactttctcgtatcacagtcggctctctgccaagaacatccgtctcctgcgtccgactttgttcaactacatcgtcactcgggaagagtttgccacgtacaccaaagagcttttccagctgatactggacggcaagctcgatatcaagatccacgacacttacccgctcgaggatatcaggcgggtccatgaggatctcgagggaaggaagacgacgggcaaagtgttgatcaagatctgagggcagaggggaaaaagagactagaggagagtcaaaagacgatgtttaaggattgtatagatcgagacgatgaaaagagcaaaagttgaattgggttccttgagaattgcttcccgtaccgcatgtcaggcaagttcaccagatgaattgggcatagctaaaggcatacgtaacgagtctgggacacttgatgtccggatgccagcacggtgacactaaaaactgacaatgataagagacttccgagtcatcgcgtctccaccactctgggtctattggagcaccgcgtaaatctggtcttgttcaagcggaaagacgcaattgtccagctacccagtcactaagactcggtttcatattctgacaagatgacggtcacggtaccatcctaagacccctactgtcactcccaaccagctgaagtgctcctgcgcactacttgcgagatcacgagcttgcgtacgggttgccgcgagaacggcgcaacggacaatgtcatgttattgatgtcccttgtgcgctgatgagcagcctcaccggcatcaatggggctcagtagcggcctgctagatgttcatgacagacaatctctcaggtaaacgcatgctgattgctatggtttgatatggacaaacgtcgacaagatgtcttcttctccctttatcaaaaaagccaaagctcgcacgaaccttcgccagagggacgaaacaacgccagtttctccgttggcccgggcggcggacgatgccggggaggatgacgaggagatgagtattagccccatgcagatggcgaagaacaggaagaaggacaaggagaagaaaaagtctggatcgataggaaagagtcgattgagctttggagtagaggatgaagaggtgggcacgctggacactcgagggcttgacttcgagctgacttgcaggaaccggcgactcaggcatccgaggaacaacccttcgtagcacgaaagtccaagttgtcccaatccatctctctacagaaacaagcagcatcgagctcactggcaggatcaggctccaataccggcggtgacgactatcacaacccttttgcgtcgacatctacgatacctgccgcttcctcttccgtctcttataacaacgcatacctggaagagctcaaagcgtccacaccgatgaaagctccgcgtgcccgggatgcggacgacgaaccgcagaccatggagatcgatgaccttcaagacccctcggctcaaccgtcattcgcctcgagtttgagccggtacgcacccctactggataccacacagggtatcccggacgaagcggcgatcgctgcggccaaagccaagcggaagacggctaccgggactggcatctcgtcgtccagcggtcttgggggagaggattacatcagtatcgatcaggataatggcaagctggcggtgttcgatgccgatgtacgaggagatcctggaccgcatccagaaagtaggcttcagcgggaggaagacgaagagggcgaaggagatgcaggtgaatagcatagcaaggcttggcttggcttggcctgaattgtttcttgcttacgtggtcgccacggccggtttgtcagagttcgccgactttaccgagacgaatacgcgattggcgattggcaaggatgcgaacaaggcagcagctcgacgtttgcgaaatgacatggtcgatgctatcgacgaccggtaagtcccttacatcgattcagaagacgtcgcacatcgctgacgcgtctgcgagatgtacagagaaatggaagatctggatgacgaggacgagatggcttgggagatggctcaagctaatcgagctaatcctaccatcgacgccggaccttctcaatcaagcaaggtgcgcatgtgcgaggtctcgacgtatggccaatacggctctgacgtacaatctcaatcttcaatccactcagtcgtcccggccatacaaggccgcgccgatccccgcatcgagaccgttacctaccgtgacttccgcctcagctcggctgcaggcctcttgtgcgttcctcaaatcctcgagggctacgcgccaaagtcagatcgagtcggcggatcgagagcttctagcttgcgacacccaagaagctgatcttcgagccgaggtgacgatggtcgaagcaaaaaaagaatggatggaagagttccgtggttgggtcgagatgttgggcggctttctcgaagaaaaggtgggttcaccgatggagtgttcgaagctttgtacgtggctgatcgaacaacgtcatgcgaaaccgccagatgcctattttgcaaaagatcgaaaaggacatgatgctgcattacaaggagcgtcacgatatctacaccaagcgtcgcatgcaggacgatgcggacgacctagccctatgtgttggtatcgtcgcgcctgcccaggcggacgaagaggaagaaatcgacgagatgggcagaactcgtcgaaaggtcgacgagtcaggagcatactctggagtgcggcgcgcgcgaagagaggaacgtgcagcgcgccgacagcgacggaacgcacgaagagctcagccgaaacaggacgaggatgggtattctacggacagctcattaggagaaggtgatgccgaggactaccaaacggcgcaacaagcgctacaagctcgtgtccaagcgctgtctagtgacgtcaaagcagaagatttccgtgatcctgaactcggtctcgccgtacgcttcggtggttggcgaaagcaatacgaagatgaatacagtaatgcgtacggcgggctggccatggtacagggctgggagtactgggcgagacaagagatgattggatgggagccaagcagggtgagtacaaaacgatggctctcgcttaggggaaccaccgtcttacgtccgcttgatgaattgccagtccgataagtcattggattcattccattggttcgactgtctacaccgttattcgcggccccaaatcgagcttcctcccgcagacgattcagacgacatggatatggatgaagagccaccgctttcgggagagggcgaccttgcggctgccatgatctcttcctctgtgaccggcatcgtgctcaaagcgattgaacatggtgtatacgacgtgtattcgacaagacagacccgaaaattggcggatttgctggatgtggtagccgaatacatcggaaaagacggccaaaaatatcgggtgagtgcgggtctcgcgaccgatgacgcagcgcggttgctaattcatttctacagggtctgctgaaagccctacttaccgtcttttccacgagtatactttcggcaatcgaacttgtggcctcgttgacctcaccgcaagcccggccgcctccggctttcgagcctgcatcgcggacatctctgaagacgttcaccaatcggcaacgtaaaatcatcaagaacctcttgttgtggcgacgatacgtgcctgacgaagtctcagccctggtcaacaggatcattttggatatcctgcgacccgtcttatctcgatgttgggacagtggtggtcaggccatagcagcagaggtatgtgagagtgtcagcggggagcaagcaatggacattgacaccggagctctgcagctcgcgaacggtattccacctggtttgctcaacccttctgcgacagctttcgttagcggaatggagcaatcttgatgaaggttgttggccatccttccaagccctaggcgtcaacgcaaagagtcatacctaacggtattgatgcaatttgtggtgaagaccaagcgcaccaagccgtcgcccgagctcacaacagggcttgtgcgacgcttcatcactgcgcttggtagacggtctagttaggcaaaatcgttcttgaagcatactcttgacccacccttcgggacgcagggagcccgctccttgtgatcgctatgaagatgctgcggttcgttcgctgtcagacatgatccttatcaataaatgaaacctaaacgatttttatgagtatgcaccgatgctgcggtcgactggattggacgtttggaatggcaatgctgcctaaatgcaaacaagacgatgtcaggcatctcgcatggcatcgtttcatgtatatacaggcagctcgacgggatttcacactttagctcatgcagcgtatacatgacgaactgcttcgacatgataattgatccgcctttcttcgctgcgatcacgctttatcgttggcgactgcccatcctataccaacctgtgtggtatattggtggtatatcggaggttgcatggaggccatagcagcgggcaacgcagccagggggtcacgctcatgagacccgcggcctcttgctagttcgactaccgcaacatagacgcctgcccaagttccctggctcgcgactagtttggatccgtctgcgattggatccacgttctgttcgctcaataatccgtatatccagcttgactctgtgcgtagctggtgggcgtatagctggtcgaagtgtcgtcctgcatagtcttgtagtccagagcatcactggccgcggtgatggatccggcggaagtccttcgcttcaatcggtcccactgatttggcatgatgctagatggggcgacccctccggcgatactggcggtgtctcccgactgcgatggggcttgctgtgatgcgtaactcggtgcatacatgctgctgtacgtccctcgtttacctcctccgagatgaggaggcaagaaaggtgcgccaggtgtaagcatcggcagggtgttcgaataggcttgtgaaacaacagatggcgcgatatagcctaaaggatcgtgagtccggtaataggctgcatcatatcgacccggggcttgaaacacagaagatcagtcaatattctttgtcactttcgtgcaccaaagcatactgactttcagaaggaacagtcgggccgttcatgaactccattgtgggagtttcgaaccgtctgaattgttccattgccttgtttaacgtcttcttgggtcgactgaactggatcatactagcttgcagattgttcagagcaccttcgacgagacagttcttctccttgtagtgcgtgaggaggtggtgccaaagcgggtgctgtatatcaaatccaggatgagatcccccctcgcgcagctaagaatataacttgcgcaccttgctcaggactttggggtttcccaatatgactacaccgtacttggctcgagtaagggccacgttcaatcgtcgtggatcgttcaagaacccgattccttgatgttcgttgcttcgcacacagctcaaaatgatgtagtccttttctcgaccttggaaggcatcgacgctagcgacttcgacctccttgtacagatcctttttcaaggagccgttgtactggaagaagttgaccacgtacgagcgttgcccttcgtaaggcgtgatcactccgatctgagacggcagaactccagctttgaagaatttggtcacaatcttctcgacattgctcgcctccgttctggattcagagcgatcagtgatgaccagaggaccggctcccagaaacattcactcacctattcaagaacgacgttccgctacttgaaatctcttcgttacccagattctggtagaaaaacatgggcgtatccatgacaggccaggggaagtccacattctttcgaagcctctctggagcggtgacaccgttctgcaaagtgccttcgtagaacatgttcgacgggaactccgataaacaaggatgcattcgatattgcacctgaaggcggatgggcttgtttccgaggaagaccaaacgttcgaagagcgactgagagagacctgctcgggcggctttcttgttcataatgacaggaccgagttgctagaagattctccagagctcagttgcgcctcttgattcgttcgaagtaacaactaacctgatgatctccaacgaacacgacctgcttgcatcccattatcaaggggatcatacactctgatagcctcgcgaatttcgatcagcgaacgcatcactatgcaaacacggttgaagactgacctggctcagcagcttgagtcgcttcatctatcaagacggtccggaatttgaacttggcgagacgcgggtcaccggcaccaacacaagtggtgcaaatgacatcggcggcagccaagatatccttctcggcgttcctaacaagcgctcggtacttcctctcgtccgtagagctaagttcgccttgctcactctttagttggatgagcttttgcaactctcggtgagtatcagcgtttgcgacttggttgtgaagtgacaggaaggagaccgaagagtcaagggcttcacgcgacttggccgcgagtcgtacgaccttgagtccagtcttgtggatcttttcggtcaactgatcgacggcaacgttggatggcgcacagaccagtacctgaccgggattcattttggcaagatgaaagacgatggaggctgacgtgaccgttttccctgttccaggcggaccctatagaaagcagacggaatgtgatgagggcaaaatcaactttgatcaggttctctcgaattgtcacctggatcaagctcaaaggcttttgcaagacgctcttgacagcgttcatctgagaactgtttagatctgggagattgggcgccgacattcgtttgggcaactgggtccggagtacctgaggctccagctcgtgtccgagaagtttgtggtactaacctcataccatgatcagcccttctcgattgctgtaccgtcattagttgaacgctcacgatatatcccgagacactcctctcgtccagagcaaaggtcttcatcgcggattgcattcgatcgaaactggtagatttccagacgtaatcgacggagaaaccggtagaacagtctgaaggaactccgtccgaacgccgaagctccagcgcgatctcgtcggatacgtctgcgtagcgaagattggtctttgggtcaggactctgagaaaggaaggaggagggctttacatactgttagggactttcacaacgttaccatctccttcccagctcgagccgctatactggctgacaccatgcaggcctcctcccgagaactttagtcgtagctcatcacccacagccagcctgacctcgccgctttcgagcttaggcatagcgaagtaagcgattcgcttgagattgagaccgatgtcccatctgatcgagatatcgttctctgtctgagattccttcagcctcttgtcgtagtctgcctcgatcttgacaagcgggccgaagatgttctggtattggtaagcgtcctcatatctagcgaacaagcaccatcgtgaggttagtccgaggcacatgtaaggcattctaagagtattagactcacttggataggatcggctgtagatcttcctcgccctcggctctctctgcatcctccaatttagcgttaggatcagatctccacaattcttcgagtctgttcaattccttgaaaccgatgtggcgagctcgcatgacttcgtgttccgtcggaggcttcaccaaccaggacaagaatgccctgtcgtcgatgatggcagaccattgggaaacatcccaagcgatgtccttattcccggtcatcgctgcacacggctgtcggcacagaagaaccaccacagtgtcgctctttgccggaatgaagcctagggtgaagacgttcttggcaccgcagttgtagcctgaaacagcgagcggtcggcccaagtccaaagcgatactacgtcaccctaacactcacactcgggagtagtatcacctagaggcccgtccggatgtagcatgacttctcgatgcctcgccctaaccatatggttgacgatgtgagtggcaccgccattgccgccgttctgtcccgtatgacttccgccaatacgagcgttacaaaaccacttgttgcaacctaggcacttgactaccgaggatggtgcatgaatcccacaatatgcacatgcgtgctcgggaagttcgggcgccactgagaactcgtttccatgctcgtcgggaagattgccggggttggctagatcatctagcacgtccagatcgtcaaaagcgacgggctcttcctcctcctcttcccccctatgtccgctagcatcgaggttcaagttgttcaggtctccatttaggtcggacaagctgacactgccattcggcgaggacggtctgacgtttcttccatcgaggtcactttccaggtgggaatagacagatgcacctccgtactacggaatgagaaggcataaaaaagatgaattagtacctacgatacgtttgcctaaaacaaggtgcctgagtatcaaggttccgatcgaggacttacctgagaagccccctcgaattgggtgaattccataacagccgttgtctaactcttctcgctcttcgacgccctggcgtgcacctcgaggtcctgttctataggtctacgcttatgccctgatactaggactaagaactgcaatgatttaatctttgctcctctatctgttgattcataagggaagtcgaagacaaaggttgccggagatcaaggcaaaggtagcaacctttcgcctcgcaatcggaatgacgcgtgaaacaggcgagagaacggtcaggcattggaaccaagagatatgatcaagtctggtacaaatggctatggaatatcatcgccatgaaacgctgcacggactgctagagcaatgctgaaccccggaagtaaacagttacaaacgcaaagaatggtgcgatggtcgttatagagcatgaaggccaaagggtggacgacctgaaaaacgatacgacctgaaatcggagacgtcccttgaggatctcgagatggtcgttatgttggggatttctatgcagtgtgcgtcgatgttgaggttctaatggcgcttgccgagatcgatccgggtagggagaagaggatggttgagggtgggggacaggatggaacgtgacggatgggtgttggaacgactttactggccaaaagcgaatccgccttgcggtgcggcgactatggaggggaaaaaggcattgtaataagcaacaagatcgcggaaaaaaaaggcaagcagaccgaactcacgatcagaattgaaagcgtattggcccgatgcatcaacggcaggagcgctctcgtcagcagcttcctcctcctcatctgcagcacgaacaatgcattgtcagctccgatcagcatgacaatcggcgagcatagggagcttaccttcggggaagtacttgtccatgatatagaagcatttcttgtaaatgtccaagttctcgtggtgttgcaggttgtggatagcgaccttttcaaccaccatttcagcacatttgctcgcgattgtgatacagtgctcgaactcaccatgccaccagcctcctcgatgtagacagcgtactggttaaacgcaccagcgccagcagcctccttgtccatctctccgatcttgagaatgttgtcaagtccgtcgagggcgacctataagatcgtttgttagcttgaactgcgtttgagcgaacgagaagatcacgctgtcgtacctggatgatcttgttgtccatcgacttcaggaggtcacaaagcggcttaatcactccctggctgaccatgtacctgatctgggagggctcggccaaagcgcctgaagtggcgttggaaatggcccaacaagcttccttcttggttttgaaatcggcgttctgtagcaagttgatgagagggggcatgatgttgctggtagcggggcacgaacgtaaggataagcgaatggtcggacgggccaggtgccgcaggcggagtaatccgacttacgcgtcaatgatggcctggatctggagggggctaccggcggtgacgttggagatggtccaacaagcctccttcctgatcccatccttgggtgacgagagcaaagccaacaaagcggggagggcgcccgcagcgatgatgacctgggtctgtaagtcgtctccagtgacaatgttgccgaccgatcggagagctggggtctgaacagaggtcgagttgtgcctgatgacaagagttgatttagcaaccggatcttgccagcctctccccgtacgggactcacatcagcagatccaccaatcgcctgcagacaccgctctcaataacggcctggatcttgtcgttggtgccgtccgagaggtaagagagagcccaacaggcatcgatgagaacctcgtcgtccaaggagtagatgagcttggtcaggactgtcaaggcgggagcgatcaggttccagtccggctgaggagcctttcctcggcagaagttggacagcgtccacgtggcatttcggagcatagacagcttgtggctctcgctgaggagagccaagaggggagggagagcaccctcgttcaaacagtaatctcggtacttgggcgagtcaccggcgatgttaccgagagcccatacgctgcatgttcagtttgtcgtgtgttagtaacagccggtcatgtgtgcagcagcgacttgtagcttacgcctgctccttgacgtccgagttgttggcactcaagagcctaatgaaaaagggtacggctccggcgttgatgacaacctgagtgtggtccgaagttcccgaagcgatgtctacagcagacgaggtctcgaatcaattccagtgctctttccgagcgatctctcggcgtcccggctttactcactggtcagagcccaggcggcttcaaactgcagcatgttgttgtcgctagagaggaacgagacgaatcggtcgacaacctgacacgcaatgacctggtcgatagggggattcttctccttggaaagcatcctatacagtccacacagcatcaatttcctgtaacaggatggaaacgggcctcactcagctccataggcactcacttcctgaactgggtggtagcggtgatctgtcggtcgatgtcggcggacattacgtcgtcgaccaattggggcaactagtggaatagtgtcagaggttagttttatcgtatacgagcaggctttgttgaatcttcggaaccggtgctcaccctctcggttccacccatctcatcctcgctctcaacgtcagtatcgtccgcagaagtaaactgacgtctcttggcggcgttctcctctcgctgcaatggcagtaataaagaaggtatataagctcaaggcttcctagcgaaactagaagtatagaatgtcgtaccttctgctttcgaagctcaacctgctgctcctcacgacgacgacgcagctatgatacgagaccagatccagaatcagccccagatccgacaaactgtatcgccaggagatgccggacggcaagcaagacagtctggtcggaacgactctgctcgacgatcgtccacgcagagacgaccccgacagctatccatgccaggccttctcgcttgctcggcctgtctcctggaccgtgctactcacgtcagcagcgttgaactgagacttctgcttgtagttcgcccttcgcaattccatgtttcggtcagacatttttgcgtgaaattgatcggttgttttgtttgtttgttcgaacgggttcgagggcggagttgcgggagacggcgcgtagctagttcaaggtctaaggaatgagggaaagctgtatgtcggtttgaatatcgttcacgaattgcgtagcgagaatcaagtgccgggatgcaatttcaatagtatgagggaaggcaaagactgtcagcacgggtcgcccccgagatccttcgaacagcgtctacggagccgtcgcccacttacgaactgtgaatctcaggttcttttgttcggtcaagcaagctagctataagatattcggggatggcaagaagctgttctgcaggtcagaggaggtaagagggcgcactctgtaaacaaggggggattatcgagatcgagaaacggttggagctcgacgatttcgagctcgagggcggcacgaggaggagcgaggggtcgcgtgagaaaaagcagccgccccccgacgcttctccctcgcttacaagtcaaagtcgttgaaaacaaaccaaacagaaccggcgacaaggacattcgatcatttatagtgtccgtgtttcaccctcggttgaggcttctgtacttcgtaatatccataccctttatacatgacgcctttctatgacccgagtccctatgacagcaatctacctttatacaattcagtttttccgtatctcttgggtcgatctcgactcatcattgcatcagcgtctgtttgcggaccctagcatcgttcagcgctccgatctggttggataggaaatccgaagtttgcggcctggcaggatttcgatcgatagacctcgtcagattgcgcagtcccacacggcaaacaaacagacgactctctcacctcatacgcagtaccctcaataaaatctccgcagtcctctcttcatcttccgacgctccaggcgccgtgaagccgctctgagcgaggctctgcgacttgctggactgcctgccaactcccttgatggcagccacacacttctccttaagactcgctacgggtaaatccaggtactgtcctatgagaaggagatccttgtacgctccagattgcagaaccaaaagaggcacgccatactcgattccgttttcgcacgcgttgaagaagctcttcagtagctgttgtgacacaatctccgatgaggtcaataagaaagtatcgcataaagaacgccgagagactcaccttgagccactgaaagactacgttgatttcttgtgtcgtaaggggatctgctgatgtctccttgtcagacaatggcgggatcagggtcgagatgaggatgtcgagaacccgcttccataagcgagtcatcaggtgaagcttgactttgtccgacatagtgactgcgaacgttgaaagctgcaagatcatatgccccatgtcagatcatggtcggggtagtccgtcttagggacggcactcacgttggtgtcaaaatagtcgagaagcggaacgagactcctctcaaagtcgtgatcggacagagatgtctgcttcatcgcgcccttcttcggcttggcacttaatggccgtaacagttccctaataacttctttcgataactgagacttaatgaagtctcccatctatgatgagtgcatcatcggttagcaaggcaaatacaaggaatgacatatcgacactcactctatccacgatgcagcgagtcatggcttctcccgctcgatctagggaccggccagcccggtcaaggtgaaatctgacttcatgcttttcgccgccttccatctcgaggcgaacgtagacgctacctcggggattgaggggtacgagcagctcgcgcatcggcacttcacggtaggcagacgggtccagcttgaagttggctgtaccgatcagatcgtgcttgccaacaagagtccgatcgaagcaagccaggtccagaacctttggaccgccaatcgtgatttcgaacgattcttcccagcttgggtccgcgcaattaagcgtggtgttggttttgagtaagcgagtgctgctgactgggtccgtaacagatacaaatgcatctgccgctttctgtagactcttgctcaacaagttctctccccttgacacggtgaccgtgaaaacatgatgagtgaacctagtgcttccgttcgcagagccgttcgttttcagatcatgttccttcacgatccttgtcgtctcgtcggcctccatggcaataccgaggtcttccaagcaagctcgagccgcacccatattggtgagtttgacacatgcggtaggaggaatgttgaagccttcgactttctttcgctcgagaccttgtatagcttgtttacttttcgctaaccacgcgcctgcttttcctcccacggatggggcaagctcgagaggtgtcgaagcgttgccccggttcggcgtcatttccgccatgaaaagcgattcgactgtcatggcgtactgtgaaacggatgccgccgcagtctgtaccagttgcaagttagcgggtattcgagagtatggtaattctattctcaagccgcgtaccctggaaaagtcaatcaaatagcaggcgcggctgtattcccccaaaggcaaattaacgaggatcgtcgaaacggcagccctgatgaactggaacaggtcgagcacggattggctgtggcgcaaggtgccctccgggacccactgcattcgggcgtcagtgacacaagcgatggcaacacaaggttatttggactcacactgtccattgctacagctcgcgatacccattcgtgggtgtcgacctcattcgtgcccttcaaccactccctgacgtgcggctcgaagaacggttccagttcgaaagccaactcttcgcctgggcacaactcttcccaaagatgacacaagcgagccgtccgctcatacagtccgaagatgacgtcagcctttgtgcccgaagaaggttgatccaggaattgtaattctgccaggaaaagtggtagctgcttagataagatgatggatggggggtgaaggcgtctaaggggcgaaggtccgggctatcagcgctggatacatgcccgatggcggtctttgcgtcttacccgtctagacgatcctggggccagacctttcccactcgttgtacgccctcttcgatgaaatccgcaagccgttcatagccttgaagcgacttctcggtgccttgtgcaccgggaccaagatcaccgctaccctcggagagcaactcgacttggttgacgacatattcccctacagcagcccctcgcaactcgtctgcggcgtttcgccagaactcttccttcaaagtgtccggcagtaaacttgagagatctggagagtccaacaaagccttgatgagactgaaacacgatggtggtggtttgatgggcggtatagcggttgtggggtagatactggaaatcgccgaaaccagatgagcagcaagtttgttgtgcaacgtggttaaggtagatttggcgagtgatcgctgtggaaagcgcacttttcatcagttgacgtttccagtattggcataatgtccgcagccttacctcgtcctggtcaataccagcttcaatatccatagcaagttcaagcagatcttctaatactctctcagcccacccgaattcctcggtgtagcttgcgcgcttgcgaggagagcctttgctcatcatccacctgttgccgatcatctcgtcctcctgcgattcccgtccgagacagtcagtccagatctggaacgaaaccccgacttcggccactgtcttgttcttgatcccccagacaccagcgcacaattccaccagctcgcgttcgcccgtcgttttaggtgtgagcggcgtgtcccaactcaaggtgaacctggcttgcttgaccaagcgtgcatagacctcgtctttgcgctgattaggggtgaagaaaaattcgtcgcctgcctgtcccgaggtagatgccctgggagagacaattttcatcccagcaagatcgggtcgagcgtgaacgagagcgttgagctcagcttgtagcgaagtggtgcggtcctgaatatatcccgacgactctttgccctggccagcagtattggcttggctgagatgaactttcagatccgatagatagctctgttggcagatacgtaagcgacctcttatagcaccccattaggacacgccactagaagactcaccttttcgtccaatcctgctcgtctcaatgcatcgagatcatgattgatcttgtccttgggaatagcgaacacccgtcgcacgacatcgatcaggtcgacaggagacccggattcggtaaccaaagatcctttcctgtcctgctccctgccgttttgcgaactgcccctcgacggactgcggtcccaaggtgtatcgattgaaccgtcactcgccaagcttacgctgctcgatgcgaacgagggagtggatggcatgggcggtggggcggtgccgttcttactacgaccgatgttgctgatgaaagagctctttcgagaaaccgtcttggcgctgggcgattcgggttccgaaccaggactggacatatcgccgtagaacgattgtgactgctggcgttcccgtgcagccacctctggtctcaagctatagagatccagctcattcatgatcctgagatgcatctccttgtcctcctctttcggtttcctgttcatagggctgtaaaacccttgcaggcaggtcgacaagactgcgatgagatgggtcacatgaatgtgtttctgcgggctaacaccaaagctcttgctaggggaagtgatcccgccatctgtcgaggggagtatcgagctgaaagtctccagcaggaccgagatctctctcaggttcaagcctgtcgtcgtcttggtcgcctttttgttgggcaggtagcttaggaacgtattgatcgctaaaacccataggacatcatgcatttgtgagattcgctgatgctatgtcagggatcgcacagatgctgtctattgctcacaggtcctccaaacggcatctccaccttccttccctaaagtatcccagaatccaggcaagaactctttaggcagcttggcgctctccttgtccttcttctttccgaacacgcctcttccagtggtagaaacggcgcttggagcagctatcattccaaacgaccctgctccgtttgaggcattcttcgatcctgggggaaagtacgagttccgcccattctggttaccattactcgatgacgctgaattgaggccggtcggggaagcgagtttatgcgtgttggatgacttggatggacgggatacggtggactggaggatccggttgatgtaactgtacgcaatgaaagaacgtcagtatgctagcagcaaaagtacctagacggacggtcgcacttacgcgaccctcagggcatagctgtacgctgtatcgtccagctcgtcttgcactccgatcggattgaccttgccaggaaggggtaggtcctgcaccataaggctgtcgaaagactcctgtcgcgaaggtcgacctccggcatgcaccatcttgtcgttgctctttgcctgctttggtgtgttctgaaggtcgagatctaccggtcgagccttggctttaggtgtaggcggggcctctccacctatgaatcccgagtaaagcatgaaaccttcactgagctcgctctcatcttgtacttttgacgatgaagccatgattggtgactgctcgtctctgaatgacgaggcggctagacctcgacgggttgtttacttttcctgtgaagcttgtcccggagcgacgaccgactcgatccgtggcttgcgagttgtcagtcccgtatcgaagacccttgaagtatggaacccggcggtcgatagagcatgctgtgtcgatgatatcgctgagcgaccggtcccgaccaagcctcacgatgggatcaacaacaatcaacagtctcagatctcggagcctcgaaagttggacgcttccaggagagattccgtgacgacaaacgcgtgactacgcgattcggatgctaaaaaagggcgcgtccgggggaagaagccagggcgggttagaccaattccggaagcggacagataaagatagacgaagcctcaaacgcacatgcgatttcttgccgtttggtcgcatgcggctcgagggtcttagcaaaaagtgatcaaacgaagagctaatagctttattgctgaaatacacgtcagacactcagacgcctccagctacccgactgtccttgctgcacccgctcgctttcaccgagatacgacgcttgcgtaatccccgaatacatctcatccagtcctttgttccgtctctatagctcaatcaatcaagctcgagccttcattctccgaaatggcaaggcctagttcgtggtcattgcttatgaagtgcagctgacgattaaaatcagtcccgagctttgaaagtttgaatgaaccggaaaattgaaagtgggacggtctagccgtaacaaacctgatcggaagcttccgatcaattcgcgatcggtcccccagctgcccccgggcagatatccgtcctgaaatcgctgaaggcgcctgattgtcatgatccgttgcacagtcaacgagcagctagaagaagatcagtgcacatcgtggttacaaaggattgtccaatattcctgaggacccgggagcgatcgcctgtcaccatcacccccttttggagaacaaagagattcagttcaccgcggcccgtctagccggtcccgaccttttgatcgggttactccgggtcgagggcagtagcgaagcggcggacgaccgtgcgagagccaaaggggttgctgtcgttttgggtgtaggatcagatcaaagtcgaatcagatcaagataccgctcgtcgccgtgcagcagctcgccttgcaccttggttcatcaagactcctttcgacgacaccccaggccacaagaccggctcgaccatgtactgtcggtgaccttgaatcgcacaaagcatagcactagcactagcacgcacacacgttgacattcgacggggccgatctcacctctgtgtcgacctcgctcctcataacatccacgatcattccctcggtcacgtagccagcacgcatcaagcaatccgtccagctccgtcaccacgatcacgcatcatgtcgtcccgaccacacaaacaatccatgtcggagctcaagcttcgtcgactgacagagcacaaccagaggctcaaggaggatttgaataggcctaggatcagggttagcgaggctagcaattcgtgagtcgggtgtgcttgctgtttgtcattccgttcgaggcgattgcaaaggatgtgctgagggagggaagggaggaagaatgtcctctatacatgtgaagctatgtgtcaactcggacggcgggagacaagggagagatactggtgctgagattcagaggacgtcgagcgattgcatcggtatcaagcaaaccgatgggcaatagcccaacttgaccacgccgtaaagcggaacatcccgacttccggatcgtcctgtctcccatcgatacctcgcttcagaacgtcgctaatccgtaactcgaccgtttgacagtctgatcaggtactgcagagctaccaaggaccccctcgtgagtttcctgccacccatattcaacagcgtcgaccggctcgaagctgattcgcatgacatctggttcacctgccgaatagcttccatccgtctggggccaactcgccaagggtgaagatccctatgctcctcctcagcaagggtgttgttcccgtgagtaccgcagtggcacatccattacccatctccgagtacttgaaggctaacatacctctgatgacatagtcatgtaatcatctgcggtccacaactatcgatggatgttcgagaatcggacctcggtgaagaaggggtcttgcgtcatacgcaaggccacagagaggaggaggtttacaagggatgactgattcagtctgggtttttgttggtgaagactttattccgggaaacatttgtcatacacgagaatctgtttaatgataccatacacgttcaacacgaaatcaagcccaagaccttaccaaggattgatcaagcccaccgggaggtacagtgaatctgaactgacaagccttgggcataccgggcgaacattgccgttattatcgtcgtcatcagggtatcgagagtctgctcctcaataaccaacgttccagtgatcccagatccgcaccaaacctcggccgacggtcctcccatcatgaatacggtgacggtcaatgaaaggcgagagccgaagctgaatggcctcgtagcgtctttcagtgatgcgtacttatagcgggcatcaccgcagcgttactcgcgatctgacaaaccttgcgtttcaatattcgaatctcgaccaggagtcaaagcgcatggtgtttcttggggtggacctatggtaccctggaatatgctgattcacggcagaatagtaggaacggatcagccacagtcggtcttaatgatcagctagtctcgcgtttcagattatcgcgctgatccggcagaaaataatgcccgagatcgagaaaaaggttgaatcagcttgaagcgagcaggagcggaatgctgtgcatcagtatatcaatcgtatagatcagtaattgctaatctgaaaggccgtcagcttctatcgatcttcgctgtacatctttgagaaggtctcgataacttgacaggcaccatttggaagctcacaatttcactgattcccactctcgcactcgctcgaagtttacttgagtatctcggcaacttgcgacatgactcgccttgcctccagaaaaggccgaaatgatatgattaaaaaacacggtacaatcccgagtacagtttctctgccacaaaacacggcgatcactgatacctagtcccggacggccaggcggaacacaaagcgtcaagacaacagttgtcggctctcgatcggcggcgatcccggacaaggagaatcgaacaggtagaggatcgccagaaattggtctggacgaactgctcggaaactcgtcgagaagtaccaacaagaaggctgcgggtaagtgcagactcgtttgttcgatctagaacaacagcgtgttgacgctgctcatacatccggtttcactacccaggtctgaagaacgggcacatcaagcgacaagcgacgttattgggcgacaaaccggcctcgaactctccacgatctcgaattcctttgcttcccaaaaatgaactctccagatctgggaagccgactggccctgacagagtgccacatatcgctcatacattgtcaagcccgaccggtaagaaagtcagaacgggagttctgggggctgggcacagcaaactacgctacgaactcgacgatgagagcgaagacgactcggagcgatatcagaccgaggacgaccatgatgagatcgatcttttgaggcgaggaaccggaatccgagtccgacgcggagtttctactgggcgagcgaaggataagaatgcccaagagccacagctggagacgatcgcaggctcggacacgattgacgaagatctccgctctgaagacgaattgaagaaggcaaaccctcacgagaccatggatagcaagttcacttggcagcaagcgtaaaattatacgcggtagtctgactgatcagatcgactgcctttttgcacagacggccaaaatgttatcgatcaagatcagacactgtaccaagaaaatgagatggaccagtggttctctagaccattggagcggcccaaagatgcgtacgttgctcacaccctacacgcgtcgacggtcactcacccgatgaccctttggcatgggcattcttgcgaggcaggcaagagcaaatcaagcagagagatatcgctttgacgacagctcaggagcagcaaatccaagatattactgagaatctcaatccgctttgcaagaatgtacagaagatctatgtcaggctgaccaaggagagtcagcccaaaatgaagtgagttacagggggacaatgctgatgttggagtcccaaccgacgccccttggtcgctggaacagcctgcagtggactatgcacggcacagcaatcgggaacgagattagggttttggcaaacgcagtcgatgaatacgaggggacctccgagcgattgaatgtaggcgcacgggtcaggtgcaggtcatggtaatacaaccactgatgatatctgattcgaaatccagagcgagatcgggactgcccgctcggccctgcaagctttgattgtacggaaaagaggagcattggaacaaggaaagaagatgctcaagaagacaggtaggtaatctggcgtgttccgatttgtcacaatagctgagaagtcgctcgcaagaaaagaaatgaaacagaagaaagagatgcaagagctgcaggccgaatttgaaggcctctataatacctattccaacaaggtgagtcagagcctttggcagctattatgatgcaggtaatctcatactcaacggaatgtctcagttggacgatattgaagaccctgagactcaacggcgatacttgcaagaaaaggttagctgctcggttcgatgcatcttcccagactcacatgaataatgtcgcgaccacttcagaaggaccgattggtcgtctcgatgttcaatgtctgatcagtttcgccatcatcaccaggccccgatttgatctcactgtgagaagccgagactcggttgagagggacttgacagatggtccaagccactgatgaggttgcgtgcttacaatccccgggcagcttttacttccggtcctcatcggatgtcagcgattgccgaaccattcgaaagtcatactttcttcctttgtttatatgtctatgcgtctgcagtaccatttacgtgtctcgatttcctatgaacccgctctgaggctcacggaacgatatcgaactggaagaaagcacacagatgcataccttgcctgatgtgacgagagtgggtctgctgccattcgaagcatcaagcatgggaccttatttgtaactctgacagctctcgcaacgggtcgttcgtatactggctcaggtcagccgtgcggctcgcatgtggtgaacgaactcgagctgaatcgtctgatcagaatccaggcgtgatgacgctatctggcaccaattgctacctagtctctcatggtcacggcccggacatcacgctgatcgacactggatcaccgccgcctagcgctcctgcctttactaagctgcttctggaatacttgagcacatcagggagtgtcatcagggacatacttcttacgcatcatcatatcgaccacgtaggaggcttggaatcggtattgagcagcttgcagacgagaggagctccggaaccacggatacacaagttcaaagcgctgatggccaattcgaccccggcaagcaggtctgttgtgagtgatgaccaactggagctattggtgcggagtcttagcaagaacgatactgggattctgtggctcgagcacgacgctcagatcgagatgggcacgagagactcagggaggtcgagccatctgcgtgtgttacacacaccaggccacactgcagactcggtttcgatctggatggaagacaccgaagagctattcgtcggagacacgatactcgggtgagtcgcattgataccgctgtcacctgacaatagtctcatgcgcagcaacacagaactggatctactgtcatcaatgacatgcggagttgtaaatgctttacacagaccgcgtaaaacgaacatcactaataatcccttttccaaaagacatggcctcgctgcggcgtttggaaacctgtggagccaagacactttaccctggtcacggaccccacatagacacgcatatggccgtctctgccaaaatagccgaatatatcgatcatcgcctgcaacgagaggatcagatcttacgcagcctattgaggcaccctcaagggctgtcggcggtggaactcgtcgaatcgatctaccccgagctgccggtcagagccgtgatggcggcggagcagtccatactagctcatctgtcaaagctggaggaagaagggagagccgttcggacagccgaaacgactcaagattcagacgtctggcacttgtcccattagacgatctctccatgcatccaatgatgagataggagccacgacgcagttacagtagcggcgcggtaaccgacgcgatgttggatacatgatgagaatgaaacaccgagttcaacgcaatcgtacacatctatccaaagtcccaaaacggtgctaatataccggatcacacgtcagcacttgtgatcgtagcaaagacgggcgtaggaattaactattcacctgaaatgcctgatttcgatgttagtcgacacggactaggcctcggtgctgtaacaactgtcgtcatccccctgggtaacgaactggttgacaagagaggatgtgtgctcgagaccatccttgatgctgatggtgacgtttgacccgggagcaagttcgaccttgatttggggagcagaccgtctcaattcttcgctcggcttgttccgttctcccacggctgactacttacgaaccaaccgactccactttcgctcatcaagaccatctcttcggtggttccgctgacgctgtcggtaatgatcacggtgacaggcgcatggacgtcctcgaacctgagcttggcgaattgacaggcgacaagaggtccagatgcgaggcggaccgaagcggcttggacgatgggcgcaaagagggccaagacggcaacaaaggccaggagggtgaaagacatgattcgggaagacattgtagatgattgacgggggtgagttagtgctgaattggcggggtgaggtttcgagagcgagtgagatttgttgtaggtgggtgggtttgcgggttgcgagtggttgagattggctagttagagcagtcaggtggggggagtacagctccggatgtgagagagaaggtgaaagtaaagaggtatgggatgtgcacagcacttgaaggattactaggtctaagagagagtgggtaaagttggacggtcagaaggtgttgttggatgtgttcaaggtcatcacttacttagaagcgacgggagattggcgttattattgggaggtcggtatatatacttgagattggcgacgaaagagaacagaaagacgcgcccgtgcgcaaacgacgctttggaaggaaacacggccccggcggtatatgaatgaactctcgatagacgtcccgtgtgcgatctcgtaggatctcgaggtggccatcatggacggggtgggtggcttggaagacggcgaggttccaaaagagcgatcgtgtcgtggtcgcagcttgggcgccgtggaaaatcaaatcaccggccgttccatcaacaggggtcactcagggggatcggcgatggaacccaaatctcggcgcgtcctctgctctcaccgcccagctggctcaaagcggaagatggctttctgaatcgcgtccctgacttgtctcgcgtctcgggaatcgtctgcccccgaacgaaaatcaacgcacatttattgatctattcaagatcgatcgtcgcttgcgcgcgaccctctgtacctctgtgagcagttccgatcgaccagaatcgtcgaacaagatctcgatcaaacggcaggcgtacgaatgactgagagatacaagcgctgatctgtttcatctcgggtgctgtctgttaacaagccatccacgttgcaaagcatgatcatccctttatcatcgaactttatcgttgcaaatgggggaagtacgacgtcgggatctggtggaacaatgcgatggccgccatgatccaagcgagaccgagtgcaccgaccagtaacaagcattgttcctccattccgatgctacctctcgaaaccgcttctccacaagccatctccaattcctccccaagcttctcagacgaaaagttctgccgtaccctctctttgcctgcccgagcgattcgagctcggctttccggcgatagattcaatagcgtcgccatcgctttggcccattgaccaggctcaggtcgccgcaacagtccggtcgcgccttttccctcgagattggcatccgtatcgacaactgtttccgttggcccgccgctgtccactcccaagacgggaagtccgcacgccatggcttccactgggacgattccgaaatgttcattctccggcgtgtacaacaacgcaatagacgattcggccgtgagcagccaggcacgctgtgagtcggtaaagttgagcaagaagacgacttcggcgttgcttaattcggcaggggtcggttccaaggcccgatcgtcgggcttgattgttacatgtcgtaaagccgaggtgtcgcatagccttttcaaccttgcataggtatcgatgttatccttcagtgccttatcgtatcctcctacggggattgcgataggtgagccatctcctggctcgtcgttttatcccgacaaggcttcattcgcgcacctgcaattactagacgcatccccttctccggcctgtccctcttgaccaggctgaacgcttccacggccagctcaatgttctttttggcctcgaaacggttgagagagacaaaagtcggcttggctctatgtgccactcatcagcgccgacctttgccaacccggtcgagaacggaaccatcggaagactcacgatgctagcatgtgcacgtttatatccttcttcgcctcggaagggtctaggccgacatattgctctaccttgatgcaagggtagacgacgcgaggcctctgcttcagcgtcgggaaagcacggttgtagacccttgcggtgaaggatgagttcgccaacacaatgtcagattcgcctatgtttgagaagaggagaccaacatgaggatcgattagagtagagagagacggaatgtgttaccggttgtaatttcttccagcttgtcaaaaggtagacggtacaattgcttgagcaaaccttgccccttcttctggactctgtccttggtttctcttggattcatgtcgctccgtccgacattgtctacctcgacctctcttccgcctgcaaggagcttgtccggaaagtggcagtaaaagacaaccctggtttgaccgaaccaacggagtatcggtacgcagacggaaagctgatccacaatgaagacatcaaagttttccatgggagctaatggcgagatgaaagggatccgaaacggaagatagatcgacgccagcaggagaacggagagatgaacttgacgcaagcttgcgcaaatgatgtgaagcgagttgaggaacgtccgtggcacgatgctgtcaccaagtacgtggaccttgagcgtgcctgtgtcgatcaaacatgagcacttgctctttcaagcttcgagacgatgcctgtcatacgactaaccatctctcgtctccttgaagcatcgctttggatcgtgcctcgaggtaaagatcacgacttcgtgaccccggtcttgcaacgagaccgcagcgtcgacgataagcttttctgcgccgcctagcaagccaatcgttcgatcagcaatgtcaaaggtagcttctgcagattgaatacggacgtaccgataccaaggtcaggatgcacgaaccccactcgaagcggtctgatgtccgccatggtcgagggctggaggatgaccgtagctattccaagcgatttcagccaacctgcaaggacaccttgtgagcgttttaatcaatcttaagatttattgatggcggcggatgattcaaaggcctgggaaaccctcgacaacgttctcaagcaggaagggaaatcgctttcagagtagaagtgatcaggtgtgacagctgcaaccagatcgtgagtcatatccggtagctaaaaaggttccggcggcttggtatcgcagctaaagggacgagatcttttgcatgcacggcccatatgggcgcgagcctgattgtatgcctgccttacaccaggacgatatcactgtgattacaagtgggaaatctctgcctgctagacgtttccaaggcggccggaccttaagctttctggtcatagcgttccatcgcaaagtctgcttgactgagctgtttatcgaggcaaacctcgggttagtcaacattggcagcgccaatcgtgttgtctggtacttgcccattgcaagaagtctctgacccagcctggagtgagattgcttcccaagttgaggaatctagcagaatgggtgtaaaatggcatccgtaccactgtattctcctgtgccgccagagagcgcacgattttctcgacaacttgtcccggttccaaggatggcgccataaagcggaaaaagagagatcgagggaattgtatcttgtcgaaaagaggtgttcgtatatggcccggtagaagcaaggtcgtcctgacttcgcgtgcgtgatatcggttgtttagctcgaaccttaaagcgtcgtgcatggtaatcaatgcagccttcgaagcgcagtagtcgactatggtccgagcaatatcaggcattcaagtcgctcgattgatcgattgttggatctcactcactcatctgggcagatccagctaagcctagcacactcgcaactgttacgatgtgcccgtttcctctctcaagcatagctggtaggaaagctttgatcgtccagaaatgcgacaaaacattgacgccgaacgtcctaaatttatttgttggtgactgttagcagaggtgctggacgaacatatgttaattgtcttgcctctctacgtcgcgctcttccagatccaagattagtttgccggatacgacaccagcattattaacaagcatggtagggtctcccacctagatagaagcgaatcagcgaggatggaaaacggattgtcaaaggcgttcaaacctcttctcgaatccggcgagcgacttccatcacagcatcatagtccgacacgtcgcagatataggaccatacgttgtctatcgtgcacgacaaagatcgttcaggtcagtcaggtcctcagtcccgtgacgttcaagctctgttccgtaccgctttggtcgtcgcatctcctaatgtccagagtcaccacggtcgcccccatagaggccaaagtctggactagcagggcaccgactcccgatgcgcctgagcaatgacacataatcagcgtgcatcattcccatgaaggaagctgggatggccgcttacctccagtaacaactaaaacttgattcttccagacgatcttttctcgacgcctgaacaacgggtgctggctgttgtagcatttggtcaagaagcgcgcgacacctgtttcgaattgatcaaataagcgactgtcgacttgacgattgatctcgcccaatttgtaagcgtaccgataacgatggcgaccttcgaatagaccgagacccaggataacatcgaacgagtaaaagcggtgtttctgagccgaggaattttaaccgctaacccgaatttgactgccgtggacgagatgaactggattacaggtgtgtcccattcttcagacgacgcgaatctcaatccgagttcgaggatccgaggcgtcatgacggcaaagggtagggagaatacggtatcttgcagcagctctacgatgctatccagcgtaatgggtaaaggtggagggtacggctcgaccctgttacgtgaggagccatttcgttcatcaatgtgaagccaaacgagaatggcgccgatcgaaatcccaatggaaagccaggcatgaaggaagaacaatgtagacgatcaacaatctgtgccgattcaatgtgtattcatgtctctagctcgaggcgaatgatgcgaggtccaaccccaaccggtctacatcgccctgtctccgcctgccatcccgtccctctgcgccgtcccatgttctccagcctccaagcgaagtgatcacacgctcgacgctcacctcccccaattctcgaccgacctccccagcgcgtccttcttgcccccggcgcctgctcgctctttggccgcgtccgcccggtaactcttcagcctgtccagacgttccttctcttcctgtcccttttgcaacttttgggcgtctcgcttgttggcgttcttgcgctggaccttggtaggtgccgaactggatgcggaggattggttttgttgggaagacgtggtccggcgggtagaaggggactggacaaagttgggattcgagctggtcaaaagggagaacctgttcaacgaaggagccgaaggagctttttgaggtaaaatggagcgtgtaagccctgtgcacggctatttcttgtacaactcgttgaactggagagcttacctctcgagttcgaagcgatcgcggcgaaactccctccgttcgcgttgttactcccgacaaacttcttgggtacctcccaaccatcatcctcctcgctctcctccaactcggcatcctcgtcctcgtacccaaagtcctcattggcagcttgagtcgccgcggtgggctccggctgagcagggggagtgggaacagacgaggaagaggtggtttgttcggggatgatcttcatgaccctcgcgatctggggttgcttttgatcctcgggaagcatgctataggagatgaaccgtcaggtggtggtcattcagtacgtgaagcgtcgttcgatgtcacgcgattttgatttgaactcactcgtcaacctcggtcttgggcgccttcttgaccttcttttcggccagggtctttggcttcttctccttggcagctttagtctgagctggtgcgggagtctgtgcctcctgctcctgcttttgctcggctctagagctgctcgattcctccttgccatcagatacggccccagccccgcccgtagtccctacgctcttcttcttcttgctggccgactttttcgatccagcttttgaagatttgttcccagactctccagtcaattcgtcctcgaaaagacccttgccgcctggcagtacagcgttggcggtctttttgactgatgccgggatgacctcttgttgagggttttgttgcacatatcgccaacccgcgatgagggcggcgaggatggcggcagagatgatggtctcggtcggaatgtaaggcatgattgctggtgaggccctgataaagagctgtccggtcgatgtgcagcatgtgcagatgtacattaagatggatgaccttgatcatctaaaccgaaagagttgtcccctctccctcgcctgatgcgccgtgacgtggattcgagaagggtcggccgaatcgttttgacacgtcatgacgttgcactctatcacacacgaccatcgactcgattcgacatcccttgggacatcatctaccctctaccagtcctccaggtgcgaacatgatggatcagggcacattgctaggctctcactggcttcttagctggtactggagaccgaaatcgtaatcatcgggcaagtgggcagtccgttcagacgggtgcgatgcgaagcagcttggtcctctgtcatcggcggaaatctcggttgattgatttcttgatagacctcgacatctccatacacaggaagttgcgacttgtagcttgtagacttcttctgcaatcgacttctagctcaattcaaggaatacatgcaacattaacttgcaggctataaatcccttttgtgttagactcccagcattgctagtcatcctccaaccaatccagcaaagatgccgaagggaccttcgatgctagcagggctctcgcccgacgtccgacaacttctgtacaaacaggtctctgaagcgcagcgcaaccaacccgtagcgactctctcaacccagccttcaggtgaagatggcgctagtgcaggtcccggtccttctactgtggagatgagagtcagagacacggaaggcactgctgacggtgcgtcacgactcgactgcatgggcgcatcaaggattctgacagttgcgttcgtgtttcaacagagcccgcgtcgaagcgtcgcaagacggacacggatgcttcgctaccaccttcaggatatgctctagggccaaacggagagatgataaagaagtcgtgggactgttcggacctggtgaagcgatacacggcagagaattgggaagaggagatgccagaagatatcaagaagtgtgagcatccctcgatctgtacggctttccttcgtcgaagtcgatctgacaatgatcatccaccgggtagacttccatcaacgcaagaccctgttctcccggtattcgacccatccgatcttgctggatcatacggggtggtacagtgtcaccccggaaaagatcgccaaccacatcgcggaccgttgtcgttgcgataccgtgctcgacgggttcgccggcgtaggcggcaatctcatcgcttttgcatggacatgcgaacgggtcatcgctatcgatacctcgatggacaggttgaggatcgccaggcacaatgccatgcaatacggagtggccgatcggatagagtttatctgtgcggactacgtcgagtttgtcgaagcgtgggcaagacgaaaacagaggcagcgggaggaaaagggtcaaatggaggcggtcgtcggattgggggaggaggtggatgtggtctttctcagtccgccttggggtgagtcgtcatctgtgccaggatatgaaccggacgtcgagttgaagacagcatttcgttgcgtcttgccaggtggaacggattatctcgcagccacggacacgacgacggacccagacgcttcgtttgcgatcccgaatcatctaccatctttccccctgtccaccctcctgcctttacccgccaaggagctttacgaccttacccgcaaaatgacacctaacatcgctttctacctgccccgtaatacggaccccaacgaggtcgccgagtgggcggatgagactccgttggttgaggacgatcctaccgtcggcgggaaggaatgggtcgaggtggaagaagaatggatgggatgggccaaggaagatccgttcagctcgaagaacaagcgtcggagtgtcgggaagaagggagcagacggaaagctcaaggcgattacggcgtactttggcggtctggcaggacagggcgaagtgtaaacgagcatggcagatttggcatggaactccctagcagacaagtgtaaatctagtcccgacggcgagccgtacagctgaccgtgtagtgctcaatcgatggaagtctagtggccaataccctggtcctgactgcaaactttcagatggtcaatcagtccggagcccgcttataaaggtctgccggtggaatctctggatcaggcgatgggacttgctcgtgtgtaaatcaaagcgtcaaatcaccaacccacgatgtagctttggaaacttgtccagcttgttcacaactttttcctttggctgacctgactctttgaatgcctgcaactgttcccaaaggccaacctggaaatcttcccaagcgtgcgcagcctgatgctcaagtcgtgctgttcggacaaagtggatcgaatttggttccgggcttcggaagtaaaagccttgcactggtagcgatcttcgtcatctttgaatccaagagcagttgcattccaacatcagcatttcagcaacgctcgccagaagctcgacatagtcattatacacctgtcccaaagtcgaaactcgaaaggatgtctgctacagcagtgcgaagagtccaaaaggcaagcgagccagaatgtaatcgaatccaggcaccggctgatttcgtcaaattatccatcccattctgctttacggtcacatataggaactgggtgacatccgcaagtcacccatcaagcacgtcgaagtagaagtagatgaatccaatgtcactcattggaatgtcaagatgaaaggtccggtgagtgttataaatgcgggagcggctgatccgcgaacccggctcaactcacctgacgcttgtttcacagcacgggacgccttaccaggccggaacgtactatatggacgtggacttcaccgaagattaccctttcaagccgcctgttgtacgtagtctatctcgtgtgcattttgaaacagatgatatcgagctaattctatcccgaatgtgtcaacagctcaaatttactaccaagatgtatcatccaaacatcgattccgacggcaagtgagtcagaaacaaggcgactcacggttatcggccatgtcaatcgctgaatcgcttttcgagaatcttgcagcatttgtatcggcgtcttgaagaccgagaattggaagcctgccatcaagattgccagtggtaagatctacggactcgtgccagctcgtcggaaaacagctgaccttctatcacctggacagtccttcaatcgatgtatgagctactggggaccccgaaccctgatgatccgctcgtcacatcgatcgtgagttttgtccgcccatgtgatgtctagacgtgctgaaacccgtcactggatgatataggcggaacagtacaggaacgatcgaccgagcttcgataaaaccgtcaaggagtacatcacccgagtaagctctctcactcaatggccgttcttagatattccctaggtctgattatacgttgctgttcccgtcttagtacgccaagtgatcaaggggacgtggtcacaggttcaaggacgatcgaaagagacttttcacactgtatttaatgagcatactcgatgataacgacacatacgcacaaacaggggaacgatgttcgaacttgcaatcgagccgtgaaccatgaacattagtcagcacgatgtgaggcagcagttagactgtctgataaagtcacctcccacgctcctgttcgccgtcggaggtccgctgcaggagaagtcttccagggtcagatgacgccaggtacgaccaattcatcaatatgtagttcaaagtcgtatggctgaagattcccctgcatcagcattggtcgtattccgcagacctgttcctcatcagaatattctatgtcaccggcttagatgtcaatagccgcagcagaaaggagcacatcgcccacagctttgcctctcacgattactcgtgaacattgtggaagatgcatcgtcattgtttcgttctgtacagcaatttctccctaaccgatgatcctgcttaatttctgaatatctgagatcacatacatagcgaatagtgagaaattgatgcgcagattaacccgaagaccccggacttaccgttaagaagaatgtcgccctgcttgaccacctgctcgtaagcgactgtcttgttctcggccgacgtcttggtcgtggtgatcacacccgaaaccttgtcaacagtgcatgccaaacgtccgtttgcgatgaaacgcgataggtctctgtgggagcgatgtgatgcgtatttagcctttgcgattcgaatgggtgggaagcatttcgcaactcacgcatcgataaaggtcgcactgacgccaaaggccttggccatccgttcgagcgttagagacttgtaactctccaagatctgagtgtacgccttgatcctcatctctcgcacgtaatacctcgcgtgaggtgcaaagactggcaacggcgtgagataagtttcctcgacctcggctataatggcatagatgagtggtcagaaagacgtcaagaaagactcgaacgaatgacttgatttaccgagcgaaccgaagaattcggcgtagttgcactcatagagagacttggtaaaggtcgccagagcgggcatctggggtaggagcgagttaatctcggcgttgttgagaacctgttgtatgaagaacgacacaacagaatgcatgagcaatgtggcccataaaatcgacgcccgaccgaacctaccctcgtcttgatccccttcctatcgcacccgacacccgtagcaatgatggtcatcgcgacaaattcttcatactccatgacctcggtagcggtaaaagtgctcaaggattccaagagcaaatcggcggcctccttgaatttcctggttccgaggaaatggatggcagagtataccttgagtcggtttcgcctgtcccagtcaccacccttttcaatcaggctacaatgatgaaaagccagacggtattagtattgcaagctcgacgtctcattatttgcaggtggaacatccgattttatgcttactcttgcgccgtcttgatgttagcgtcgatcatgctgttgtcattgtagaacatgccaagtcggatcttggcaaggacgaggtctatccgtgctccaacgccagcagtcttctccagagcagcatccagggctgggagagcgttttccttcgttataattgcaagatcagcacaatcgggtttcgaactctcgagaagagtccatcctcaccttgtccccgatcgtgaccagatatcccgccttttccctcatcggttccgaaacatcagtctctcctaagctctcctcggcatccttgatcatggcgtcaatcttcttgagctgttcctcgttctttgttttcaggcgagactgcaagtccgccgagggaggtgtcagagaagagggcaaagtcgacatgtacggcgccatctctgcgtcgaagcgatcgtaagatcagccttcttcactccgaatttggctcagtcagtcgatgatcgatctcgactcaccgtttttctcgatgctctcccagaacgccttggctgcctgctcgtgcagtttgctcaggctagggtcttgcagctggaaggcatactcgcggatcttcaagtcgagaggaataggtacggaatcgtcggccattttttcaggtcaagtccggatttgcttgacgagtgtgctcggtctattggttcgtgcctactcgggataatgggtatgtggcaagttggatcatctccttttacacgcaatgatgctaacgtttgtacctgtacgtcgaggacgcttcgtcatgatgaaccgaggtcgctcgctcaagtgagatcgaagcaaggcgacgcgtattgacgctttggagggataggtggcaagaacagcagtggtcaagatatgcctgttcatcattactctacgcacgcacaaacccatggaccagcacaaggggtaatggtaatacatcatctaacaggtcggagggccaaaatcggactaccaattggccagatccgcaaacggatctttcttgacgggcgcctgagcctgtggctgctgaccggtcgcttgacgtgatccgttgttcggctgtccccctccgatattggaaggggtcagaggcaatgaaataccagtgccaaacccgttggaaggcgtcaaactgccagagactgcggaagacgaattgccaaagtccaatcctgcgaacatgttcggcactgcttgttgctgttgaataggctgctgcatcgacggcatcccaaagctgttctggggagcctgttggaagccggacgactgttgctgcataggctgaggggtattgaagaaggccattggatcttgtcgcgcctttgtaggagcgctagatgagccggcagaggcgaatgatgaaaagaggtcgagcggaagtccacctggagcagcagatgctgtcggctcgggcgtataagtcccaggtgtgccggggctgagcgcgttgaggttgctgtcgtccccaaacacgtcgaaagagatgaggtctgggggcttgttctgagggttcaggctttggggaaaataaagtcgaccggttagtgactgcattcgtcccattgatacggtgtatcctggagcttacgtggcatcgatctcctgagcctttgcccaatctccagtcttgatggcttgatagcgatccaggacattgttgattaggtcattgatcaggagcaggcgatctgcaaagcggaacgacaagtcaggacgttagcgtgtcgcggccgatgtttgagacgtctttcgtcacacgcacccatcaactcggcattgtcttctccggcgtcgcctatccatttctgaatctttggtcgagccatcttacagatctgagcgacttgctgatgttgcatcaagtcatgagaatcagtttgctcggtgaatctacgcaggtcattctcgactcacatcatacgcgtccccttcgatgccgatcttttcgccctcgtctacgttgttcaacatgtcattgagcaagatagccttctgctgaaccttttccagctcggtcttggtctgagcttcgtaatcgggttgtttctcgggttcctgttcatcggatgatcagatcagaatgtcgtcttggcatcgacttgaaatggctggatctggcttactgctcctgagagttgcttcatcaactcttgcgcttgagcgagatctcgaggacttcctcttcgaatcagctcttgcagtttctatgtagagtaaccggaaaatcagccgtcggtagctcaggtcccatttgtatcctctcacttacggcagacttggctgctctgtcttcttcctcgagctcgtccggagatttcagattctaaagtcaagttcgatcagtcacccgtatcaatccaggcgggggatcgttgacatacttcagtaggattcgccgatgccatcgccctagttgcgtcgaaaggtttgaagcggtagcctgtgaacatccaccgatcaccattagccggctgggccgattcacagagaacggtctgtactcgcctttgtaagaaagcaaacgatgcatatcccggatatgaacgagatcttccttgtgtttagacgtgacacaaatcgtgttcttccattcatggatgagctaaaggggtcatcctgatgagcgaacattccgacaccgtctgttcgtcccggttcgacgcacctcgagcgttttggacatcaccggtcccatgagggcaggcggacgttcggggaaccgacggacgagctcattcaggaattccttggtcgagatttgcaggtgaaatgggtatccgcattgtttgaccagcgtgtccaatagctaaaatccaggaagattggtatatcatcagggagaggcatgcggcggtcctatgaaaggccaactcacatgcagtccgagcagagcacaatgtggattccggtcgttgatcttacgcacagtctccatggcagcctctcgtggcctggaaagacggacgttggcagactgtgagcggtccctcgtatcatgatgatcggaagacgccgttcgaggtgacatcgtccggggattactcacgtgttggcctttttgttgttgaccaactcggcgagctccaggttgacagcgtagttgggctcatgggtcatgggatccgtcgctcgttctgacaagccggccacaggtcaacaaggtcagccaccgtgacagaaacggactttgcggttgagcactccttgtgacctaccgacgagcgtttgaagcggcgtcatggacgaccatggtctcgtcgagggcagcatcgtgtcggacgagacctatgttgtaaatttgtactgggtggggtactgcgatggcccacaagtctttgggattactaggagcatgccattgttcgaagcgaatacaggtcagaggtggtctatctaatatcatccgatgaacgctggaggcctgacctgacccgacgctcgctgatggccgtggaatcaaagatctcgcgtgtcagccaaacccacagccagagcgcgctcctagggcagtcagatctgtcggcgtgttgcacgttgacgacatggacatggatatgtatatggccatctgcatattcatgagttggtcagacctcgagctcatcttgctgacataactctccatcagtttcgttacaaggggtatgcgttcgtcgcctacggaaacgctcaggaccactaccgtgagaatccgggatcgctcgacccattctcgcccgaacccttcctctgcgccggccagggctgtccatacgatcccgagcctgctgcacgacctccccccatataccctggctgtggctgttccatgccgtggaggtgtgacaaggtgtgattgctcccgttgttgctgttgccattgttactgttgttgctattgttgtacatcatttgtggttgaggttgcgaggcgtacgggtgttggtgaagttgcgactggggcggaggcatgggtccacccgctcgatacatcgattcatgagggtaacccccggtcgaaccgacgtcagaactggcactcgagctcgaactgctatatgccggccgaggaggcccatgccacccgtcgagataccccgccgaagctccagcggtagtcgatcctccatacggaacggtgtcattcaacctgagctgaccgaaccccatcccgtcgacatcgccggggccgatgggctgtcgcatcggtcctgcattaaacccgttcatgttacctcctggacccatccttccataacctgcgaccgcgccaggtcctattccgagctgtggctgggatccgggctgataacccccaacttgagtatacatggcgtaccctcccggctgctgctgctgctgctgctgttgttgctgttgttgctgctgggccgtaccctgataaggcattccgccagacaagcccattccgtacggtgcgggctcataggtctggtacgtccccatcgccccgtacccgctcgcattgaaccgatccctcgtggcgcctcgtggataacccacccctgtccctggtgtcgaattcgaggtcgagtaagatccacccggtcccacgatacctggcatggacaagtggccggacccggcaccgccaggcggtcggagcggttcaaaatgcgattcacctcgtctcttgctgctctgcgtcggacccgtacgagctctggacgaggacgacgtcgatgaaccggggcctacgcttccgctccggctctgcgtttgagattgacccagaggtgtccccgagttaagatgcggagcggcggaacccgaggccaatgacccggtactgctcgacccggatctggcaggtgtcgccgctccactctcacacccgctgatctcggatcggttgtccgaagcgttcgtctcgccaggagtcgcaccggcgttgactccacctccgacgatagcagctccctcggtcgtcccaaagatcctctctctcgcccgtttatactcttcctcgcgctcgatcaaggtcttgttccgcctcgagcccgatcttgagccgttcccattccctcccgggctcccacgggacatggaccccccgtccctctgctcgttgaacgcttcgttgctcccattgctgcccgtcccatcgccgccgctattctggttgttgtgattgaaagacgacgaagaagccgaggtcacgggagaaggtcgacggaggatcctcagcgaggccgcggtcggcatcgggggtgcgtttctaggcagatcaggcatcggggccgagttgttgctgtcatgtctcccggggtcgaaaaggttcccatcagccgtctagaccgaaaggaccaacataaaacttggagtggactcacgcttgctcccatagctgcgaattcgtcaccaaggtcgacctcggatcacgattccactcgtcatcatccccaaagggcgatgccgtgccgcctgctccctgcgccgtggcgttggcggtaggtatcgcgggttcccttctcatcaagatcgtcggcggcctgagagtcgacccggaaaggctaggcatcgagggactcgtacccgatccagagctcaacttgtgaggagcttgttgaacaggcatcgagagtggtgctggacgatcttgctcggtcgaccgggtggagatctgcttatcatcctgctgcgtcgttcgcgatcgagtcgatgcatcgtcggtagtgtaagcgctcgtatcgctgagactagcttccctgccttcgatcgctgggccgaggaggacgctcctccctgtccccgctgcgcccgttccggttggcccggtcgccatcctggatccaacagaaggagcaacgggaggttcaggctcccacaatctcggcgtagggggtttgctcgtccggggttggaaagtaggagcggaaggacggaggttggcagctagttccgaagcggcagaaggctgtctttgggtctttgtctgagcgatgttgctgaaatcggcctgtggtaccgcatcatgacgagacgacggagatgacaggttgaacgtcaggttagcgaccagtatatcgtgaacactgcatagcagaagcagactcacggtctcccaatcatcctctgaccctgcgaccgagggggtcttgttctcgtggttcatgctaagattccggaatcgagcggagcgttcacgtcgtcatgcgggtgagcggagctgagagacggtggaaggtcgatttatggattgatccggggagcgtaagcaaaagccaccgatgtctatgagatggtcgtctggagatatgtagattcaggtcgatcgatcgatcgatccgctagtctggctcataattgttacattacacattgtgagattcccctgggctcctcatctctttcccccttgatatgggtcggagaaacggacatcagtgatcccgagttgcgattgaaaacaatgacatgtccgcgaatcatcgtttgatgtccgtgatctcgtcatcattctccgaaaaaacatgttaatgtccgtgtcatcatcctcttgggtcgggttcacagagcatgacgagtcgtcagccatggcgaaacgtcgaagcatcaagcaatatgactcttttaacttgatctttgtcagggttcatctcgatctcacacgagcaaccttcagaaactgtacctgtcactcgttagcacgaaacttctagacacagtcatgacatcgccgctggcacaagcaaattcgatcgcagcatcggacccatcacaggcggagcagctctacaaacagatcttgaacgacaaggccggtgagtcgccgctcagcagattcgacccgtccgaccgagtctcgtcgtcgcaagtctagcgactgacagttctcgtctctttctttctctctgtatgcgtctttgtagccaacgatgagcagcttcgtgagcaggagacggctctgctcaagctcggcggactatacaaggcagcagggtgagccgagcaagacctctactttcctaacatacacaccgccatatgactgacgatcaacgtaaaccccgtattcggtttttgttatagtaattcggaaggtttggctcaactcgtgacagactcgagagatttcatgggtagcatcgccaaagccaagactgcgcgcctcagtaagcacatctcttcgcaagccccttacctatctctcaagccttttgctgattgatgttatctttccttctagttcgaaccttgatcgactctttcccttccaccgaagagggacgggcgaagcagatgaccgttcttcaggataacatcgcatgggctaccaaggagaaccgggtctttctgcgtcagagcctcgaagtcaagctcgtcggactgtcagtaccggggtttctccttattcctcgcttcgacacgtaaccgtggacgctgactgacgggggaactcgaatcgcactttcactcgcatcccgatacaggcaactcgagacgaaatcctaccgcccagctctacagctcatcgaatccctcttgaaagagctgagaaagctggacgacaagatgatcctcaccgaggtacacttgcttgagtcccgggtgaaccacgcgaccaagaacatgcccaaggccaaggtgagtcgtcaggtctcgtcgtccacctcggaacgatcggagcgatgagaggacatgttcgaatgaagctgacctcgatgagcggatcccacgttgtagtcggcattgacttcagcgaggacggcggcggcttcgatctactgtcccccgttgttgcaggctcagctagactcgcaatccggaacgctgcataccgaggaccgggattacaagactgggtgaggcgacgatgaagaggaggagaaggaaacgtctacctttgacggcgcagagaacagaagctgactctgacaatctcctcgtgcatgacaggtattcgtactttttcgaaacgtttgaaggctttgctggacaggatgatgaccgggcattgccggcgctcaagtacatgtgtctatgtaagatcatgatgaacctcgtacgtaatcgcctcggctgctctccctaatacgacaactgagagccgcatgctcatccggttgtaaattgacgcctgctccctcagcccgacgacttggcaccgatctttacgatgaagatggcccaaaaatacgagaccaaacaggacctgaaagcaatgcaagccgtggccaaggcgttgaaggataggagcctcgaggcattcgagaagaatctaaaggattacacgagcggtgagtatcgaccatcatatatggatgacgaggagaagtcgatgctgagcacgagtctcaaacccgatacagagctacaacatgatcagctgatccggactcatttggctcatctgtacgacacgctcctcgagcaaaacttggtcagggtcttggaaccgtactcggtagtcgacctcgcccacgtggcacaggaagttggtcagcccgtatcgagcgtcgagtccaagtgggtcttctgcacgttctgaacgcacccggcgaaagggcacgaccgctaatgagaatgcgcgtcggtgatttgtaggctgagtcagatgatcctggacaaggtgttccatggcgtgctcgatcaagaaaagggaagactgatcgtatacgacgagcccacagaggacgtgagtcgaccaaggtcctatttgccacagcttcattgtgtcccatgttgaccgctcggctttgttcagaccacatactcgacaacgctagagaccattagggaagtagggacggtcgttcagggcttgtatgacaaggtgagcgcgcaaaccaagcggtagcggtcatgctcgaagcttaattccggcgaacctatctataggctacccgtttgacttgatttccgtgcaagactgtagacaaagtggcgtggttttctcgtcttgtgcattaccttacgactatcaatgatatgaaacggcgtagctggtggcaagactagtccgctcatgggattgtcctaaggctatgctggtcgacatgtggtactcgatcgaagactgactgcacgaccatgaccaccgcggtgcaagcgagccaagtcagggccccggagacgcttctagagttgccgctatcatccagactagactccatcgaacgcgagaagcaagaccgacaccccaatatgaagccggggctggattggttctgtcgctcttgtcaagaacaaggtcacaaggaacatccttcggaacggagcggcgtaacatcgaccatgaacccgagtcggttccccgaactccatcgcattcccgcgcctagattcgagtcaacggctgtgctatctgtatcgcccgctcaatcctcctcaaaacaagcattgatactttgcgccagcctgaagagatggagcatattgcatatacgtagatgtagataatggatacagtgtcgcaggaaccctttctcagacggtgaagcctccctgtgcatctaactcgccctcagcttctgatgcggatgcgagatcgtattctgagaactctgactcgaccgtgtcgatcacggcgtcctccgtagaccgagtacccggtatcgcctgtctgggcgtagccaagaatggtgttgctgatccgctaaaagatttgctgggtgtagcttggatatcggtcgactccatctgcatctttcgacggatacggtctgcatctatggtgtgcaagtgggagctacgtgccaatcgtttgccattgaggtgaggtgtgatgttgtttggtatgagatggcgggaccgtgtagggactgccgtgcgaggtagctccaggcgatcagagagaactttcgcattcagcgtcaaagtgggtcggctcttcttgttcacggggaccggagttcctggccgtctaggggagcctctcgaatgacctaatgatcgggttcgagctaggggcgatttcactgatggagcatgtcaggcgagaagaagcatagacgacaagctctacgttcttacctggttcctgaccatcgatgacaaatgtcgtttctcctgtttccgcatcttgcttggttcgcttcaattctgccattgtactgttcctggcttggatcaagggcctgactgcctgaacatccacggtcgccgaccgcgacaaggcggacaaggcgatgaccgtcaacagcaatatcagctgagcaatgcctctgcgtttctcccaagcgatctacaaggcgccaaaccaattgagctcgcgggaaaggtcgcaccgttccatatcaacccacctcttctgtcatagaacttagctggttctgcagcttggcgatggtctctatcagaacaagatccctttgatccatcctcacaagcatttgttcaagggtctcatctgtcgcgattctctgtccaatcccgcaagtcatattagcgccatcgagacttccgaactgatcacgtgcgaccaaccgtcttctccgcggcgagtcgttgctgctgagcctgatcgactctccattgggaccaagatttctcgagctgattcaagagaccgcgattgaccctactctgttcctccacgtacatcatcccgagcgtggcattgccttcaagcgcattgaggcgcctgatgatgaaagcatagatcgactctgacgagtctgccttgacattgttgttctgcctcggagtggcagacgagcttgaagctgaatgtgatgcaacgggcctcgacgtcgtgctcgatgattgcgagatcgatgtcggctggtcagccttctttccgctgagagtatgcgtctcttgagcaggttcctgggacttggcctgcggcttgacttcggtgatcgttgcattgacttggtcagcttcgtgattggtcgtcgcattgacttcgctgcctatgcgccccacggtgctcaatatagtcctatcaggaaatgccgaatctacgaccgaggcgttatgggtagtgttgaccggcaaagagtcactcgacagtggcgcgtttgagctttctgacacacccgacgctgtagccttgggaggctgcactgtcagcccggtagacctaggctgatcgagtgttgtggcggtgctgagtgtgggttcagtaacgctcgcactatgctgaacacctgcagaggctgagtcgatggtgcgactttgagaacccgccatcgagtcttcctggcgagggtttcgacttttaggttctgctacagtagccgtctgtactgagatgggttcggacgaagcagggagaggcaatctccgcttccgctcctcatctgcctgtcttcgtgcccactcgtcctccctctgtttgttcctcttggactcccacttgaaggcctccatctgattcatcccatatgccttcacgctgctaatcggacagtaatactccttgccataataggcgggaaaatcgagccggatgaaacggtggaaagaggtcggacttggcagattgaacatctgggatcccctgacgttcttcgcctcgaagacggcgacttgctcccactcgtttcctttgcgagatgtaccttccccatcctcttccataccgtcagcctcgtcatcctcgagcgcgtctacgctcaagacgacctgcttgacgactccggaaaagaactcgaacatcccgatctcgacggcctctattcggatctcgtcacagagctcgatgacgacccagtgctctttggcgttgcatggtgtgagcatgtatcgatctttcgacttgtgcaggaccgacgaggcgtgctgggaagccgaactggaagagatgacccgggcggaacagtcgggtgaagcgtaattgtatcggtgaggcgggttcgagacttgttttccggccgacccgccggttttggaatttgacatggggtctttgactttttgcttcggtacttcttgatgaacgtcttgctgtgactttccagcatcgttcggtggctgcccagtatgggtctgggcattgacttgaacgtcagggtcgacgtttctcggttcggcgggttcctctggttcgatgccgtgcacaagaccagacgctacggcttccctgaattgcttctccttccatgcttcaaagctgagaatctcggccgagtcgtccttgtctggtatgtacttttgtacgacgatcgaaggctgttccggcagctcgtcgaggaacgattcgacaggcttgatcttcagcacttcgggtcccggagtgcttgtaaccctcggcttatcatggctaccccctagagaagatagtctgcattcggtgttgaccagacactcctgccggatatggcggaacgaatctacgggggtcgtgtctgggttgaagggatctgctttcacacgttccgagagggcgaggacgcctatgaacgccgctagccgatatatgtgcatgcttgcatgctcgaattccacctaggaacctttcgtgtatatgatttccagtgtttgggcctgacgttacggctgatgggtgttatagtgtagtaatagtagatactccccttgtagcttccttgacccgagtaggcgcgagcgcatgatgacgattcttccgaacttgatcaggtcctgagctccaggtcggataactttgactatgcttgcttacaactcgagacgcactacaacgagagacgataccggtttctagatttaccgaaaccaccatacaacatgtttaaaaagtaggtcgtgggccgttgtagacctgttgccagcaggacaagggcatcgactgatcgactgacggaaaattcttgaccaggttcgaccccaaggaagatatcgccagttcgacttcgctcaaatcatcagtacagcgacatatcaggacgtccgtatgcgagcagattccgttcttgacccggcccgcccacacgaatgcttcgccagccgaagccgcaccggttccggttgctgagcccgaagctcaagccgaggagccagcctcgactgagcaggtagaggaaaagacaaaaggaggaaaaggcggcaagaagaagacaggtggaaagtcggaaaagaagggcaagggcaaaaacgctggagatgacaaggaggagaccgctggtggtcctcaggagccattgcaggtcatcgacgagatttgggggaagaaagaggccattgccatcaccaagtggtgagttgttactaggccgacccccgtctgatctcttgactaacaatgtagcttgaactcgactgtagtcgtgaccacataaccatctacaccttggatggcacccccttgatctttcaacactttgacgggccccttgtcccaaccttgaaggtgctgcatcaatgtgagtcctttcgagtgtccagattacgagatcaagcggttctgatctctgccaaccacaacgcctgacctagacccggacatgttgcccaaggtccgagtcgataggggagctatcaagttcctactggctgtgagtttcccgaccatgctaccccgagagcgccagcttgaaacttccgacactgatcttggttcgcagggcgccaacatgatggcaccgggccttctgtcagcaggtggcgatcttccagctgacctcccggccaattcggtcgtggcgattcatgccgaggggaaagagtcagcggcggggatcggcaagttgacggcgagcagtgaagaaattcgaaaggcaggaaagggagtggccgtcgaggtcatgtgttatctcgggtacgtcattcaatgcacatacagcgcaacgtggaaaatccaaatggtcttgttgttctgaccaaataccttcttactttgatagggatgatctctggaaggttgacaagctctaaaggcttgtccctgtcaatagaataattggggatatctcgatatcgttgaacacagtagtcaggaaatgctgtctatgacttgtcgcttgtagacgaacgagatggcaccagatgaaatatgaacagcgttcaagcattccgctttctccgcgccagacgcccatagcaagacgggtctccccggcctctgaagatagggtctccctcgtattcgagtagtgttgcgaccgcgaggcaaaccacctctgccgacatggatcccaatacgagcatagcttccaatttcacgaaaccgcacaatttggtcggatgcaagcttggcagcgagcacggctctcaagcgcggacattgtaaatatgcaaatttccgtgcgagtcgatttcttctaagcgaagcagacattgaactgtccgacacggatctcacccgtgcgacgatatgatgacacaccaccacgatatcaaggtacacgaccttattttgagataggaacacggtgactaccgaattggttaacgtgaatgccgaatgtgccatcctcttggcgatactgagagaaagccgagcgtgagaacgttgagaaaattgcaggcagaaatgtgtgtgatgtaaagatgctaccgaggctaatgctgaatacaacgactggatctcttttgatttcttgcatgcattttgggggttcaggcgagcgcacatcgatgagaaatgtgaacaggttcttcgcagacacttgttctgccaagtctgcatggctgtgcctgccgtttttcctcttttttttggttcggtgttgggaggaccgcagtcgtctaccatatgtcgtgcagttgatggatgtgatatggtattgggagaagtttatgcgtgatgacggattctttcgttgatgaaatgttgttggaacacaaggtggtgaacctctgttggcgcgtgggaggggtgatgctagggggttttggtgaggtgctgaaagctcagccgagcctgggtcataccgcaacgcgaccatcaaaggtgcgcttaaattcggatgtcgactttgagcgagatctacgatcggcgacgtcgtccgacaattgtcgaggggcggtgtcaggcgaaaaggtcggaacgatcgggcggctctgtctaggggcaggcttgatggtagctaatggggatcccgctcgaaaccggtcataattgagatcgccggaggccttggaccctcgacctcgttcgaccgattgcattgcctgctgatcgttctgaagagaaccaacgatcgtatccaactcgggattgtaatggctgtctcgtgtcgtcaagcggggaggggcatggtggccacgagctgactgatcatcgccgctggaacgctcgcgatcgctactggattgcgaccggtcacgatgccgacggccatgactgcgtttcctatcccgctcgccgtctcgctcccgcctcatcctcgagccagacctgccggtcctctgttgggccataccttcgagaccgagatgcgacgaaggcgtacgggaggagcgggacccttccctgtcagccgcgctcatcttccgctcccgactacgaccccgataggagttgttcctctcgaggtcgacagggggaacgagagcgtcctcttcagagtcggaacagatgaccggctgagttcgtgcgtccatctgagtggccgaggtcgtcaatttgggcctcaacccggcgaacaagtgggccggaaacgactttcttcgattgtcgattggagtgtctttgatgacaatccttggtctggaccccgaacggctttgtcgctcggtattgccgttctgagccgacttgagtgcggcggtcgaagaagatgcctgaaactgaggcgactggtcacgaggattggcgctggcattggaaaagtctaccgcggacgaaggggctcgggtggcgttggcggcgagtaacagcggggaatgcgtaccataggcaaacgatttcctcttggcatcgccgttttgtgtaaggaccgacgagtccgacacgttcctcagtggcgcaaacgcaggagatccgaggacgttgttgggcctagatgcgctgttcgagtcgtgtcgcttggtcgacccgaaagggagaagcgcgagaggcgaggtcacgctgttggtgtgacccggtcgacgaccataacgcaaggtcgactcgactcccttggtaggagtgctgttgagctgctccttgtacgactcgcgttggctgtgagacaagtcggctcccggagaagatgccttgtaggtgggaattttgaccgggttggatgacgtgctgaacgtgttgtgatagagcgtgtgcgggtgaggataagccggaggaggcaaagtgaaagcgtcctctttcgggctgttatccagtcctaatactgggtgtgtaaaaggcgagggtgattgcaagggcgacgatgtttcagactgcgacgaggtcgaggctgaggcatcttgcccgcgaggacgacaagtggacttgatgttggacgccaagagggctgggagcgaggccataatcgagggtgaatcttcgataccggtacgtaaccgcctcgaatacccatcattggccttgcaaacatcgtcacaatacgacctgtagacacaaatcctgcgtcagtccgctgatacgcctcgtacattgcttgtatccgatgtgtactcacgcgttgctgtcccgcagaggcttttcgcaactgaggcagtacccgatgtcggaaaagatatccgtggtcatcctgctcgtgtcaaatttgttagacctgacttgcaaggtcggtctcgtgtagacctgtttcgttgaacaccaaggagcggcaggaaaaggcggaacgatggcgatctgacgaggtttcgacggtgattgtcgaaggatcgtcgatctgcgagggagggtagaaagaggcggagacggaggagatggaggcgggcaagcagtagatcgaccaggaggtcgtgtcaaacgtttgggaaagggaatggaaggttcgcaaagaggcatgtcaatgaaagttagcgtctgaatcttggttgatgcgcgtcaaatctccaagggcagtgtgagacggtggtggagtctagttcactccttttgaaaaacaaagcgtcccttagtgggtgctgtcaatttagttattgtccgagtggtcgtcggttcttttggtttggctttttttgggggtgggcaaacgatcaccctgtttttccgtcggggggtcgggggattttgggtcgatcgagatcgaagattgtaggcgtcttgaagacgagttgaaggtacgaacgaaaacgaaatccaaaccgagccatcaaacattcaactcaccgaaaaagaaagtcgctcagaaacgggtcggactatatagatccttgccgaagagcggggtacgacggcgagtcctcgaggttaggcctgggtgatgaggtctcttgccggaatagcgtcagacgctggagtatgtcgatagaggtcgaggtttcctttgtcaacgtgcctctcaggtagagacaagcgacaagacgagtgcggttcgaggtccgcaagtgtgcaggggtccgaccaagtgacagaggtggatatgtgggagaggtcggagatgtagatggtctggtggtgttttcgagtgaaactggcacaactgttgttgacagggggggtatgatagggagtatgtgaaaggcgttgtttgcagggcggatgatgagacgcaggttgaaaggaggtcgtgatgcgatgtcgacaggtcggttcaaaccaagccgatgatgtgatcaggtcgtcagatgtcgtgatcgtcgtggcgaatgtcgaattgcgagcaaggtgaggtcgaatatattatgttgcggtcgagcagtggtattggttcatagagtagaaaggagaggaaagcgaagggtcagcttttcattcattccacaggagcaaggcatcgcatcatatcgatcacatctctcccgctgccatgccgagaaattcgatctcgcttggctggatgcagggtagcattggttgatgggaaaggaacgtgacccggggcgacaaggggatcgggtctgtcaaatgacccctcggccacatcgaatgtgttcatgtccagcttcggtcggtccaaaaccgctccaaggtgggcgagtttcgttaaaccttgtcggcgtccaaactcctatcaccgagactctgacacagtcgtgcagacgatgatcatcgccatggcaaagcctctctcgcgatagcatcgtcgtcggccatgcgcacgttgccttggcctggaagtgtccttccatcgtggcagatcatctctagaaccgatctctctctttctcgctctctctcgctctctctcgctttcctttcccgtcattctcgcaatcgtggcctatccctttgatcggtttgtcccgaaacccagattcaaccctcgtcgcccgctcaatctcgtccttgggatccacctgatgcaggtgcgatcaccctcgaaactcggctccaacctccaagcaggtcgtagaaaggggaaggacaaaaggaaggttcccatcaaatatctgaaactcacacaaggctcggcctttttttctgtatttgctgggtgcttcgtctggagcaatcgatgatgaagacgaatgatcctttctcttgatctctcgatgaatcgatctcttgaatagtaggtgctgatgcaatcagataggttgacgattgattgtcggtgacccgcaaaaatgatcctcggtcgatgctgggagggggaaagggtttgggttcgggcagggaaggccgactgctaagaccaattccgtgtaacctgtgggtggggaacgaacgagcttgggcacggtgaccaggtgaccgtgatcgtgcgtgaacgtcgggttgatgatggatcgacgaccttggcggatagaagatggtttgaatttggcgttcgggcgatgctgactgctcacgaccgtgtgaggggagcgaggcgaaccgaggtaaaagtcggggtaattgcgaatttgtcaggtccgtccttttgatgatcgtttctcggttcgacggacaacagggcgaaaatcgaggtcgggtacggggtagcgcaaaaaaaaacaaggacaagaggagaaaggcgtttcgtagatcgaaatcgaaaacgttggcaacgacaaagagagagaggtcgatccaatcgaatgggggtcatctactagacgaggggaatggtggtctatacccgaaagacctcgggatgcttggtcaagacgtgcgaatgcgacacaggacccacttggcccaactgcggcgaaatgactgcaccggtcgccttgagcgatcacgacactcgaatgacctgagagggggggaaacgtcgtcgttccggccgggacgatcacttcggggtagggcgatcaaggaggctttttttcgaggtcacaaagggaacgagagcaaacgaggaggcaaaaaaccggccacaagtcaaaggcaatgtacggcagcggcagcggttttttctttcccttcctgccaaaacaagcccgatcgctccgccgagttctcctgtcgacgtgccgttttgtgaaccgttctctggcctctgaacccgacaaatgtctccgaatttgagcctgatcacgatcaagaaacacaagcagggctgtattctcgatgcaattcttcatctcgctcgtaaggctcgacccgaaccacgatcgcctgccgagagttgtgcgatgctgacatgatccgcgcgctggggaatgaaatgtaactgcacggcttgggggctatgggaatctcaaaccggaatgccgtcagagcgacgacgcgatgacaagcccccgtacatatcggaggaaaggggaaacgtgtgccctatgcctcgtgatctcgctgcctctgttgtcatggttagccccctcgaccgaggctcggcctcaaacgcgacatccagggcgatggcgacaaagtggagtgaaaatctgctccgttctcgctgagctctaccggtgacgcaaacttagttctacgtcgtccgcgcccgcggctttgaatcgcctcccgggctacaggcaacaggcaacaggggcatcgggaagcttgagcacgacatttggcatctgaatattttcccggtcgacggtcacgcaatgtaaagtgacctggattgtggatggcatggctaccctcgtcagggcacccggctgactggcaggtccctatcgagccattctctcacacgtatccccaatggaaagatcgaggtcgagatccatcacgatgcgagccgaagagtatcgccgtcaaaaccaaattcgcgacgacggcacgttccacgagatccacaggggtcgagatcggatggatctcacggtccctgcggatttggccgaagcgccaggtcgatcgtgctctttggtgaacgtgatacgtgagacgcggccgagggggtgaacgtgtcaatcgctttccccttgttttctggtcccatcccaccccccccccttgtaatgttcctcgcacagcttttcgggagttgccgtcgacaaattgcgatagatgatctgcaccgcatgtaccctcctcatcgtgtatcaagcgggacctacgacgccccgggtcatctgctatcgcgcgaatggggaccacttttcgagcggtcagttgtctcgccggatctcacgcccgtaaatagagtgtcgacgctagcagcagcgacaagcagcatgagaaccgtcgacgtggaacctggtaatctccgacatagagacgcaaatgcgcatgacacaccagtctgatggacagatttaccaaccttatccatgcccgtgctcatgcgctcatgtcatcgactggatcgactggatcgaggcaacttgtacgcgaaagtcccccctcgatccccgcgcgcaaaccttcgagatcgtcgagctctcgcgtccatagcagctgatcgtcgctcacagccacaaatcgccgcccgtcgagcgggtgaccctcgatgacccggtcctgaccgaaacgaccgagttgcaccgccgatgatacgtcgttctcttcaacatgttgcggtccacgggagtagaccaagtgcgagagagcgctgattctggggagatcgatgtcgatcgacatgcaaatgacgctgaatggcgtgcgtgacaacgggggcacatctttttcttcgctaccggtacctcgcgcgagtaaaggatttagcaaggggagagccgggagcgcaagcaagcctcagatgaccccgaaacgttcatcgctctgctcgagtatcctaccgttcgagaggttcaattgagaggaagtcatcctcgacgacgaccctgaccccgatagggactggcgttgagccaaacccgagggggcctatgtgatgtcctgcgggaagaggtgaataaagaccggggtctccaagcctttctcgagttgcgcttggaagtggtgtgggcgggcacaagggctgagcacgatggcttgcgaggacggagaaatacaagcgggcccccgaaagaagctgggggtaaggcgccctttctcctcgtcatcgcaagcaccgccatgttcagaatttcgcttcgtaatctcgttgctgcatatgccttagctatcggtcagaactgaaagcccacaggctgccgtctcaaaccgggacgacctgaatgcagatttgtcattatcatggcaaactggtcatgcctatggcatagtgcggaacgtcctttgctttgactacctagtcgaacctaggcgatgctatgcaactcggctcatgcgagcgtaatccgcggtgcactttgtttcttgcagctgtgaccccggtatgggcgcttgttttgtttgtgcgcgtcaccggggcgacgtgtatacttactaaattccacttcgactgcgtggaagggagagagagagagagctctggcccttcctggataatgggtcattcatgtcattcccccctcccgccgcgcgcgtgtgcgtgtgccctgccccctggcctagccgccgcctccgcccgttcatacctctctgcaagctgcaagagcctttacacctttgtcaccgttcttacccgttgcgttgacgaccagattcagtcatgtcgacatgaccactcaatcgataccatctcatcacgacgaattgtaatctgcctcttctcctaacccacgaagctacgcttggcgccgctcctgcgatcatactgaacgtcgcatcggagcggacgattctgtcgaccttgcccccccccccttcgactcgcgcgtcactcaaactctctctatttagcaatttgactcactggccccgctactatcgacctagttcgccatcgtctggcctatcattccccttgatcgtcgaccgtctttctcgatcgaaatctaccggacaatacgcacatatacatttagctggtggacgagatagagaaccatatcaagaccaggcgaatttcgccctcggggagatcttcgaccgacgggacgaagatagcggaacaggccaggacacgacgaggacctttcggcgtgtgtttagagtcggcgagcttggcgaggtatctgatatcattacgactaccgccaaattctctgcacaaggtcaagacgtatcagctaccatcgctcctcttgtcacccgatctggactcgagcgacccgaacgccggacgttattgtcgaaatcaaggagatcgaaccggactttacgggaagacttttacacctacctttctgtttcgccaccctctccaccgacctcacacccactacttacgcggcaccaccatctatcaaatcgccctacagcaacatccatatctctaggactcgagaacgaagccttcttacccacaccccgacctccgggtcagagcgggacggccacctcctgaacttgaaatgtctgggacgaggtctagcgggagggtgaccagatcgacgctcaaagcttcgggagagaccatcgtcctgccccgccgctcgaagaacggtacggacgcttcctcgaccgcgacccctgcgtcgtcgagagcgtcccccagcccgagcgtcgacctggacgggaatacacggcaagatgttccggaatcagctaggattggcgtcaaggggatcaaggagacgaacgctgtcggactgagagcgagacgaaggagtacggtcgatcccgccggcatgcctacggaaaaggacggtcggcgggtggtcgaggtggtcatccccacggcttcttcgacttggggagcgatcggtccgagagccccgcccgtgtgtgcggtggcgggaccgggaccgaggtcgatgagtttgcgaagaggcggttcaggacggagacagagcttggtcgaggcggaaacggatggagctccgatgagcgtggcgcaagatgtcatagaggtgatcaagccagaggttcacaagacgagaacttcggcgaggaggagggaaaaggaatcgagattggtcgagctggaggtgcctcgagaacctcgtcctgagtgtaggaaacgggcaggaccggatgtcgaggttgatgtcatcgaggtcaagcaagaaccacggttggacgaggatgcacacgaggatatgatcaccgtcctctcaccgcctgcttcaaagcgatcttcaaggatcagtaccgaagaaccgatccaacagccgacgagagccgtctcgaggagacgatcatccagggtggatcgccgtgcctcaatatcggcatcggtatcggtggacgtgaatgacaggtcagctcaagaggaagaggcccggtcgacgacatcactcagcgaaccgccatccgatgagatcgccgggccagaggtgcctgagggggatacgattatcgtgacctcgcccgtcgttcgaccggtctcggcggtacccaagtctgcgctggaagaacctacggcatcggtgaagcgggaagatgctgacgtcgtcgtcatcaaacgtcgaaggaccccgcctgcacggctaccaccatctaagcagtcggtggagagaacgactcggcgaggaacatctactacgaaacgatcaccatcccccgccaagcccttgaatatacccgtcacaatctccacgcccggtcctccacggacctttgcaccaggggcggccgatcccaaacccatcgacccgtcccctatcgccagtcccgcctcacatagtcttcgtagcaccaaggcccagggcagaaccccctgttcggctccctttcctccggcagacatcactgactctaccctgggagggatgatggcgctagaccaagaagaactggagaatgggtcgattatccaggacgacatcaaggacgacaagctgatggcggtgtgtgcggcattagagacgttcgggaaccgagcattgacagcgatcgagattggggagacttgtgtgaatcaaggttggatccgacccaggtgagtcggacgatctgtcctgggtttctgaagaattgtactgatgccctgtgatctacgtctcttcacacgtagtcccgccttgcctcctcaaaacctcgtgcagagcgccatccgcgcttacacacgtcgctgtgcctctcatcgacccgaacgcgtttgcctcgtccgcagacacatcctcgctggctacgccatggaatctcggcttatccccgcgctgcatccatcggcagctcgggatgggcaacggcgaaagggcacggtatactttttggaaggcacagtaggcaggcgtacatggaccagcccgttcgacaacctgcccgaggaaccatatgctgggaccgtgatcaacgtcgtcaagcgcaatcaagaccctgctctcaagaagattggtaatacgaagcaagtcaggcgaggaaaagcggcagttaccccgattgcctcgggcaaggcggactcgatagacgccgttttggccgaagatgtggacgcgtccaaaccaaagggactcaagatcaagatcaaactcggtggtgtcgtgaacggcatcgcagacacgtcacaaacgagattctcgccagacgacggtttcgacaccatgatggacaggccgatcgactctggcagctcgacacacgacgattcaggaagcgagtctgatgaagggtccgaagtcatgcaagacggctttccgcaatgcgactctgatgacgagtcgagcgaagatagtgatgacgagtcgggaaaccctatggacgaaaacgggctgccgacgaccggaagtatcaaggatcttgctcgctcgtttttcatggacagcccccggcctaaacccatcacggacataccttgcaaccaagtaaggttctcgccattcgagtcgagattcgagccggcgttcccaagcaacccgttggacagcatgttcgacgattctgattacatgcctgccctttcgccttcggacggacaaatgggttcttcctccgaggacgaagatgaagtcgcgaccgagtttatggacactatcgacacaatcgacttcgagagacttggccttcgaaaagcttcaaacaagcgagtcgggttccatccgatggcgtaccgagacgttctcagccccgttgacgccgagggcagcgagattgatacgcccgcaacgacgcctcgaacttactgcgatgaggatgaagcggaaacgaaggagacattcgtggcagacgagccacttccggatgtggacgaagagttacaaaacgccgtgcacgtgttggggcaattgctgcccgatctgtgtgatcccgtcgatgtacccattgagacgccagagccccttcacatggaagaatgcttgccggagaggagcaatggcgtggatgtcgagatgcaagtcttgatgcctaatgctaaggcgtcttcgatcaacagcatcgattcctcggttcgccctcgtcgaaagagttccgttggggctcgcgacttcttgaggttatcccttccacttcctctctgcccagctcccagccctctcaactcgccaacaaggccagatcattccgtcggcgtgctcacctcaggtcaagagctatcaacagagctcggacagcacgaactggaacgcaaggatcctccaagcgacaacggtcggatggaagggactagtgacctcgagttgctaccggatctcgaaagacagtcagccaacaatgactgcgagtcggcttgcatctgtagtcacgagccggagaattccgtttcaatggacgtagaccctatctccagcccaagagactccgtctttgctcccgatcccgaggacgaagtgaactcaaactctgccctggtacatgaggatcttactcgatcatgggcggacctcttggggcccgaaagtgttggcatggaggagctggataacgtttggggatttatgaacgctgccgttgccgccgctgccgtagatcaaggcaaacgcagacgccgcggggagcccgactgtcagagtgtcgactcggcgaaaagcgactcttccgatcgaacccttcaacagaaagacatctggggtaccatcggggtcggttcaacagcagacactagcgcgcgtgctcgtcgtttggagaagactcggttcgcccgcgtactcatgacccgagccaaaatggccaacgcaaacgcaaacctcacagtgtcaaatagagggtctagtaccggcgatttgtcactggaacatcaggttgagaatgacgaagcgttcggaatggaagacgtggccgatgccgtgcttgccgcctgggcggatggcgatactgtattggaagaagaagctctcgatacgtacagtcctgaactcgcggctcttgatgaggactatctacttcgcgcaggatttcaataccccgtaatcgacgactacgccataggagtcagcccgtcagctttgaccaagtcgaatgagccggaaatttcgcaagtgaccgtggagccttccgtgtcagacacgagtatctcaacgtcagaggttgaagagcgacaaccttcgacgacgactgatcagaatgccatgggcaacatatccaaactcgaaaacagcgggtcaccgcacagcaacaacaaggccagaccgaccacgcctgtcccgggcgccaaaccgggtccggcacaattgtccaccgcgcctggcggcgcgaccttgttttccaagctgccagccagactgccggcccctccacgtccggtggcctcttcttccacctttgtcaatgcgaccaagccaagcaatccgccggttcatgccatgcttctcgacaacgtctcggtctttgctatcttgtggggggaaagattgatctgtcgtcgtatcgatagtgattatggtatgtcgcacgcgccgtatagtcatgtgtctattcttactcaccgtgtggatcgatatctcgcagtcaacttttcgacactgctacgcgcactccgacatcctgctactgccgaaatcgaacgcaaagtcgcgcagcatccaactagtctgttcctgcgcgacaagtctcatggtatcgacggggtttgggttcctctggacgttgcagagaccgaagctgcagctatccacattccctcggcgttggcggcaggcctgtttcgggaagacctggctgctctcgtgagtttaggtcatcccaaccacgatactagcgttcaagtatcccaactgacgttcacgccccctatacagtttccggagcctctcgcccagatcaagagcatcttgggcgctcaaggcaaggcggctatgggaaaggaaaagattttcgtcggaggccgcatgttcggtatacccgtgagtgttctggagttggcgcagtttgtcgctgttacataactgaatttaatcatatgcttcacagttcggctgcatgggacaagcgttcgtcaaggaacacccgaaagccgtcgcaaatataccgctgtccttgcctctggccgacactacggtcacatcctccaactgccccgccatcataccctcaaaacgcctcagtgccgctaccacggcgcccaaatccgaaggcccaccgagcaagagacgcaaatcatccgtctccattgcgcctgctcgtcgtctcacccgagcgcagaaacacaactcatgaacccaaagtcaacacttacccatttacgtccttttaacgaatattttggcacgccaaagtgattgcaaaatagattgctgcacagttgtatagagaaacccaagaaacccagctttgagcatgaattatacatacatgtacaacatgtcctagagatctatcaactcgacgattctgatagcatctatagctgctgacgggacaagcccggagcaatcgaataggtccatctgatgattgagacccgaatgggaatgcaccggataacttccgccaaagcctcccccatttgatgagccacccgcggctgaaagatagaacacttctttgacccgcgagtggactagtgccatgacacacatgacacaaggttgatgcgtcatgaagacggataacgatgtcaagaggtatccggcaccgtttctcgtggcttggatgtcggcaaaaggggagaccgtgcggaggcgagcgatctcggtcacacagctgatcgtcgcatggcgtaagggatgtccggcagctttacgggtgtccaggccaaaagctctaatgtcgggggtaggaggtatagcgtcgggttcatgaagtagggcctccgcaggcggcgatgcagcatagactgccatgggaagctctcccttggccttgttttgcgaagccagctccaagaccatccgcataccattccttacccaagctttgcgatgagccgaccatggcagatttgacgctaatacaggtcgctgacggagggcgaccggccacaacgaacggagatgttcgacctctttcatactgtgtgctgcccgggccgggacagttacctccaccagagtgagatcggacagcccggcgtcatattcagccaaatcctcttgtacctctagtttgctcattttcaaggtgagatacagagcgatcagtgtctgcccagcagataaatttttgtagattcttctcaggtgtgacagttcgtcttcgacgaggtttcggttgcggatgtatctggtgcggcgttcagattcgtcagctgcggcggcatacttggggttcgtcttggaagatacgtactgggacagcttcccgataagttggggaggcaaatcggctgcccatatacgaactgagtagcgaaaagatcagatcaagtctcgtccggtcgtgaacgagtcggatggcttgacatacgagtagcgtcgagagctggttcccctccttctgacagtccctgaacccttttgaccaaccgccaacccatgaaaccaaattcgtcctcgaattcttctgtacccgtctcgtcgtccttgatttcagccacatcttctggagataatgtgatggatggagccaggtcgagtctgttcaaagcggcttggtacgttgacgtttcggtctgaatcggctcggacggcgagggtggtggcgcgagctgaaccacagtcttcgcagttgctggggtcttgctcgcctttctcgtggcctttttttgctggtacttggccgtcttgtcgtcttgcagcgcctttttctcgctcttgcgcactcgcttctcctcgtctttccggtcttccgcggcctcgtcctcgacgaatcccagccccccaaagagatcatcggcaggcgggtccgacggagattcgtgcatagccttcgcaacgatgtcaggtacatccgtggtatcttccgtcggtccttccagggttcgttcgtcccgtggctgtgattgaagctcatcggctgtttctgattccatcatcccagctaagccactgaacagagcttccgcggattcagccatctcctcctcgtatccttgttccgtctcagcctcatccttgccgtagtctggcgagaaccacaatttcgattcttgcccataacagatgaatagctcttctcctttcgagatgggtcgacttgtcatgaacaccatgcctggcgacacatcgggagtctttgatgtgggggctcggcggatgaagttaacattgggcttgggggaatggttgaacatcgaagctatgctcacacacgaaatgggtcagggactcgttcgcctagtttcttcaattgcgcttaaacggacctattcctagcccgacggccatccccccattgctccaattgaaagcataccctcccagaataccgtcattcagttttccctgttcccattcggcttgtgtgaggacgaggaccggagattcttccaggaccgtccccgctggtatatcttcaggtgcgaacacaccccgtccggccgtctttgtctgcctgacctgaagcctcaatgggttgtgaagggtcacctcgtcctcctcgccccctgccccttcgccctggtgtgtgtcaaagaggcgacatcagctcgagtgaacctcgtcaccgaggttaagaggggaagttcacaaactgtgcgctccgattcgtttgactctgtgcttggtcgaaaagaggcctagtcgggggtaatgtggataggaggttgcgcatgttcgatgtatcgtggcctcgcagggcaatcgctagcgctcgaccgtctctctacgggaagaagcccgagccaaccaggttgaatgggatcagagctggttcgagtacggatcgcgcggcagggtgacccgactggactcactatcacgtatgccaaggtgactctctcggtacccctgtctacccacacctcctcgatcgtccagtccggccgatctccgtcctcttgcccacccgcttccgtctccaaggccgaatgcaagctggccaaatccactcggtccgttcccccgagacctgtatccgtctcgacgcgggtatcaccgctcttctgtctcgacgtttcttgatgggaagaccgggtgggcggggttcccgacccgatcccgaaccactgtccgatccctccccacttggtcgaattcgtgttcaaattcgaatttgacgagcccacggtgcctttggtctgatccgcgctcacggactcgcccgagcctagcccgatggaagagccccatgaagagatgcccaatttcttccatgtcccgctttccgagtgagagtgtttcccctccaccgaatgtgttcgtgcgtgcgattccgacgatctagaagttcgaggcatggtctgttcgagcttcgaagcgaggtaatccctcagaggttcgtcgtcgaaaatgttccctcgctgacccaaggggtcctgtggggagatgaatacggcctcgagatcatcccgttcatcgatccatgcgtcccacatcgtctttatcgtcgtcgtggccggatctacacccgtagtcgtgcccacgcctgccgatgtgaggcttcgcatggaaccagtcgacgtctcccgagcgggtcgaccgcttgcctctatccagtcgttccaaaacgtggtcaaagcggcctcgacgtcctccctccctcggccatccagagcacgcctcagcgacccgttctcgacctagatgaagagtcactaaactttactggaggcggaaagaggatgagaggagtgactagcttacgaggtatcgatcacatgctcgtcgaagcgaggtcttgtactgttcgtccgtctgttcgtccgtgatcacggcagacctcggggcaacggcggtagaggtgtgcgcatctccatgcttgttagacgttttagtttcaggattcggaggaacgggtagggcgtagacctgaaaagggaacgtcggtggtgtgtgatcaggtcgacgtacgattgggtcgactagggcgagcttaccgcgatgagaagatgatcctgctcgatctggtagatacaagtcacccgtctcttggagtggatgatctggaacgtgtcctcttctggctcggggaacgattgagcctcaatcatgctaatcagatgtcagatgagtgtcagatttcttctcggccgcatgtcttggattgctgtctgacaaggacgagtagagtagaagagacgagacgagcggaagcagcctgacgacctacttgacgaaccccatcaaccctttagccagccccatttgcttgagcacgacgttccactccgtgtctccgcgagcatctttcgagcctgatcctccggtaaagaggacctgggagacttcatcccagtcctccttgtcgacgagtgagagtcgacgaggaggtgcatctgtggaatcgtgcctgagtgtcgaattgaagatgatgaggtccgtgagggactggctcgtcatcgtcgaccttgcttgcgcttccgatttgagtagctttgagagtgtatgaactggaagaggagaatgtgtgtgagtgagtagaggagagtgtacacacaggacacagtagatgcatgatatgatcatcactttggcactactggctcgaccactatatcatcatgaaaacgagtagaaacatgtcagcaacactctctgcgagtaggtcgacaacttcgtttgatgacgattcatcaataaaggaatcaaccctcgacctaactcgaatcaatcatcaccactgtcgtcagcctcgcatcctgtatatacgcataccatcactccggcgacctgtcatcaattcgaatcgaacctgatcccactcgaaacattcccaacgcacacccaaagcgccatcacgatgccccggtccaacctcgcattctacctgcacggcctgctcgctctcccgccctttctcaactttctcgtcctctctttcaacccagaccgactggcaaggacacagacgggtcatatcctccgcaactacgctttcctactattatcgacctcgctcgtgacgttcgttcacgtctccaaccaaggcccaggagctagggtggacgaacggaccaaggatggcaggatggcgctcgccctcgccgtctaccacgtagcgcctatatggagagcgatcgctaggatcttggcgggagaacccgtctggacgaaagagatgggtgggcctggggtgcacttggggacccacgtcgtcgtcgccggcgtcttgctgaaaaagggattgatgacgggttgaggagagcgagagagcgcgcgcacagactgccaccagggaacatgcgacggactacattcttcttgtataaaggtcacatcgcatatgggtatatccatcgtcgtcatccatcataaaactaacacgcactctatcgccgcacatcaaaaatacatatcaagaactcgtcgtaaaggtactacgaccccccgcaactccctcgtatataagcacgggatcgtcaaagcctcagccgaacccaaactagacactccttcctgcctgtatcaaccgtcgcctcgcctcattgacgtcctcgtagacagcactgatctcctcggcgctcgtacccccgtgcgcaccgtgagactgctcgtgttcccctgtccaacgatgagacttttcggccaagaacgctcgaaggctgtcaaagtcgcgaacagacgagagtcgagagtcggacaaggaatcggtcgagacgttcgttagcgatcgaaatcgagtcgacgtcgatgtcgactatacactcactcccagatctccctttcgagcatccccacatcccacctccatacgtacacccaggcgagtacctcgttgaacccttcttcccccgcctgtaacccgtttttggccctctcgacagagacgtcgggtttgacgatctgctcccccagatccgagcttgaactcgaacccgtactcgcgcccaccgtcaacccggcgagcacgaccgacagcttgctgatgggcccgagggtgataatctgcggtctgacggggaggtcgtcaaagtacgggctagacccatcggccggtgccgagcggggatgcggcggtaatccacctccaccaccgcccggactgaggatgggtggggtctcgttggcgaacaacaaggcgtccgatcccggggtcaggatggcaggcgagacaaagggggacggggtccccatcgatcccctgatccagacccgggcgtattcctacggctcgtccgagaaaagaactatcgatcagcctgattgttctctccagtgccgtactcgatggcgcttcgattcagggcgattgtaaactcacatccccttcaaaggcgtctagggatatcacgtccacacgggtcaacccccgcacatacgtccctcttacacaggcctcgtcatcttgcaatttcctaccaaaagcgtctcccagccgactcgcacgtcagccctcgatcgttggctttccaccggtgtgattcccactcgagagggcgatacgagttgggggcgcaggcactgcttaccttttcatcaatttcgaggattccagagcggggaggatagcagggtagtctgcccccttgacgcaatgccggacgtacccctaccgaatcccctccagtcgatcaacaccatgaccaggggaaggaaggatcgggagaaaagaggacgagcggggactgacgaggaggatggcgtcctggaattcgagcgtcgggtcttgatgccccaatacccgggcgaggatcaatgggtgcatgagggtcccgtagaaaaagactttgaagagatgatcgtatgatcagaattagtcgagggggatgacgatggatcgaggagaaaggggtgggatgtggacttacaatcgtaacgcatctcgtccgtcttgttttctcgctccctggcgagatcgaaatcgctcctccccgcggtgacggcctcgtcgtatacgttcgcatcaccgggaccactcccttcttccgacttgtgctgctccatacctaattcccttaatctcctctgatcttcgtcgtcgagcgagctttgggagaggacggataacctgtttttaagcttgtcgacctcggcgttccaggccgtgcgttgaggtggagcccctgaacccctcaaacccccccgcgccgaagtacatcgaaacccaaaccgagactcgactcgactcgactcaccggtgggaccgtcaacctgcccaacttgaaacaatacaccgatacgctgaaacagttcaacacgcccccgtcgtcccgtggcttgtcacgggtccgacggatgatctctttttccatggttgtcgttgcggtcgtggttgtgccaggagaatgcccgttcggagcgtcaggctggggacgagcggcagcggcactggtactggtactggaaatgttggtcgaagtggggttctcggtgcgagagttgtgggtgtcgtcggtgtcggtgacggcggcggccgtggtcgtggtcgtggtcatcggagcgggggtttccggagcaggtctcgtctttcctcccttggaacccgaaccggaccgtttcttcggataagtcacgtactcgccgaccagatagatctgtacccccgacacacaaacatgtcaccaaaaaaaaacccccgatcagccgcgcacttgattgacggcacagaatgcaaaccacccggaaaatggagctgacgactaaaatctcatggaagactcacccacttgtcctcgaacccgccgatactgagctggatctcgtaatcagagaacatggggatctccttgatataatgataatgcgcggctgaatcacgccggcgacgggaacgtcagcgatccccactcgattcacccggccggcgggtttgatttgaggagggactctctctctctcgaccgagtacggactcaccacccaaggccatccagcccccaggagcgaataatggcgaaaagagctcgatacaccccgccatccgggccgaatcgaggttcttggcgtaggacgagttggacaagtggtagttgtagtcgccttgtaatgcaagaaagttgagccgagccggttagcgaaagagtcagcgccgagaagcaaggaggaggaagacaatgaggacggcgtagaggaggatcgcgtcactcacaatcgtcgaacccggcggtataccgcttgacgctcttgacccccaacgggtgctcaaacttgtgctttcgacccaactcgaccgctcgacggatttgagggggtaacgaggcgaggtcggaagtaggtttgggaagtccgatttggagtcgtcggtagtactgttgtagacctaatcgacgggctcggtagtgcgccatgatggccgggtaccacaccttgactgtgtgatgggacgaagtcgaggtcggccgtcgatcagccgagtcgtgcgagatgaacgggggacgacgaggtacttgccatgccagacgaaaggccatgatttggcgttgaggacgaatacgagcaggatcaatagtttgactgcgagcgtcgtggtcggacgagataagctccttcttcatcaggccgtctgatatatgacgaattgactcgcctggtttgggtatccatggaaagagcgattccttaccggaccaccagcgtgcgagcgttgaggacgtcatgatgtcctctatcgtgctcgtcataagagaggtcgctgatcgctgattgggtgtggcaagatgatgttggtcacactactcctctatatgcaagctgatcgctggatcgctggctgatcgctgatgataatcttggcaagtcttcagctgctgctctcgattaaccggaaacagacacagagagacaccgggacccggaccgggaccgggaccgggaacaaaaccgacaaaggtaggcgaggcaaggcaaggcggggggcgacgcgcgcacagagatgacgaaaatgtcttgggaatcgggtgacgtcgaccgaccgaccgacctcgttggctggctcttgcgtaggcaatcttccaagcacggccgatccgagtccccagaattacggtcacatctgataaaagccatgtctcaggcggcgagccatcgttatcgaaaatacgtcgaaaacgggctgatgtcggtgatccgcaatcggatgtcgcggtaagcagtgtgatcacggtgcacctagttagcccccaacaccgctctgtgtttccatattttgatgttcttgtccggccgtcggattcgtgctgctacaacatttcaacccgacgtcccctgcatctcctactctcctctctctctctcgcctcgctctagtcgttcatgcgtctatactttcgagcactcttcgcatctacttctttccgtcgagcatagcggcgatggacttcatgaccaaagcgggggactgagcagcgtcgatacccgcccagataccggtcttgcggtagtaatctaccacgggtccggtttgctatacgcgccgaaggatacgtcagcagatgggtcatacgagggaaacgtagtgagaagactggacggacctggtggtaagtggtcaacctctttcggagggtttcgacgttgtcgtccgatcgctggataagaggctcgccggtcaagtcatcggtcatgtccttcttgggagggttgactgtaggcccggaatcggtttgtcaataccggctatgcgaggactgatgcacgtacgggccggacccgactcgactcacactctcggtggtaagaccttcccgaaccagggtggatcagccttccggtgatcctcgatatcaagagaccgtcagggaccttgagctcgagagccttgtccagcttttgctggttgtcggccaacatgtggtcgagcttttcggcctggacgacggttcgggggaatccgtcgaggatgaacctgatgaccgtatcgtcggttttatcagtgttgattcccgagtcaacgacgaggacaagcgcaaggcctcacccgttggcacactccttgttggtcttcaactgatcccggatcatcccgatcatgatctcatccgagacgagtccaccagcgtccatgatcttcttggcctccttgccgagcgccgtctgcttggcgacttgtgatcggagcatgtcaccggtggcaaggtggcacacgcagtacttcttttggaggttgggagcttgggttcccttgcctgtaggtcgggagagcggttcgaggtgtcgtcagcgagggtgcgggatcggatttgaatgagcgggaatgactgaccggcaccgggaggtcctaccaggtagggagaacgaggtccatgtcctgtcagtatcccgacctcgaacaattcggagctcgacccggctcaccgatgaggatcaacctcttgccttcggtcgcattggtctcgccaacggcctgcttggcggcaccgagagcatcccgagcgggctggacgatgtgctgctggatctgctgaccggcagtttgctcgaggtgggtgatcttctcgttgagctaagagcggacgaggagtagagcaaaacgtcgggaagcgatgagagtgggttcttcgggtatggcatggcgcgtttctgcccgtgtattcacctgagagaccagcgttttgaggtaatcaatctcgggagacgaagaagagctagacattgtgccggactttatgtatgagatacaggatacgtgcggaattctcggttcgaatggtcgacaacattgaatgtcatttcgacatttctgacgacttggtttacacgacatcaccccctcatgcactacctcgacaagcgcaaaagtgaaatatcgcgcttttgaatggcagataccccctcccgccatgtcttatggctcggccgaaatggaccgtcaaagggtggcaacgaccataactcaccgggagtaacgttcagacgtcgtatgtgactgtgtgcagcgtgataccaggtagcgacatgctcgaaggaaagaattcggtgagtttgcgggtcgagaaaaagagggatccgtacccacgtcagccacccgcgccacagcccaacgcaatcacaacatgctctatcctctctgacgcgcagatgtatataggaacaatccacgacggatcattgggtcaaaacaccagcgccgagtcctgccactggatcaaaacttggtggtatccctctgtacgaaccagtgaacgcaggcctcgtggatatcgtccatctcttgctgggtcgtgtacccctgataaacgttcaacgcggcatcggtgagctggtgcagctggccctcatcaaacttgatcttgccctccctggcttgtctgctcgcaggggtcaattgcccggcgagagcatcgtggttcgtccaccagatctgttcacgatccccagtctcccgattgtatgcctgaccactcgagtagtaggtcatccgtccggtatccctttgttccttgtcgtgtgccttcacggtgacgatgaattcgtgcaacaccttggcccgtttgaccaacttccacgcttcgtaatattcggccccgatgtacccgttcaagccaaactcgcgttgctcccattgagttcgagcgtggtgcgcttgaggagggagaccgtcataggtctgagtgagggaccagtaactgtcctcgtcgtacccgccacttccgaggtaggcgccggcgagcttggagagttgagcgatgacggccccgttggatgtgtggtcggtgtgggacatggtgaaattgacttgagttcagtaagaactcagagggtagactgcggtgttgcttgatgtgcatggtagatgtagcctttgaaagcatccaactaagttgatgcctcccttctttttataccctgtcgcctttgcccttgaagcatgatacgtcagatcacccccgaagaaccaagggagaaaagcccgcgttcctttcatcgaaacgcctggcagatactacgccatttcctgtcaagccactgtcctgctaccaagaacccctttgatccgctggacgcgcctagacaatgagggaccaggatcgacccggagtttggaacatgaaacgcgtaagacccctttcaatgccaggtagtgggcatccggcgatggcctagggatgtcagcccacactcagtaacaaattagcacttagcgaattgtaggacgatagatacggctcgtcgagtattggtaacgggtgcagggaatcagacgggactggcactcgttgttgtcggtagacagtcaaagaagagacgatcgcaatcatgagtgattgcatctcgggcgcgctccgtcgcatatgcataagatacgatagactgattatgagcggaaattatcaaggcccaggcgattacttcgaattccatcagttcgatgtgacaggagtctcgttgtcacaatgagcccgcaggatactgtagacccgagtggcaaaggcctgacgattctggatatcgcgtgagcacttgtacttccggcacaagtgttggaacgtgtagtggatccaataaaaggtccatttctccgcgggcttaacgtcacgcttctcgacatagtccttttccccctgtataatctcatgcttgtcttcctccgaatcgtccgagaaaccccaatcgtataggtcgcaattctgcttgcccgtccgtaagtccttgtacctctgcacgatctgagagtctgtaggtccgataggaggtggactttgtgcttcatcaggaatttccctagatcgatccgagatagactggttgtcatcgatggagccgaccttagacgggacaggagactgatgttgcgaattgtatgaattcactggagcagctgctagttcagtctgagtagattttgagcctgagctggcttccgtcgacggtgggagatctgcccacgggccgacctcactatcggtggcttcggacctcgtatggtcgagatctgaatgttcgcgtggtgtgcgactgtcgggaatgatcaaaaattgttcaggcatagtctgtctgttctcgagagtgttttggtgaccgagacgaatgctccttccccttcttcgccaattgaattggcccgcatctttgagcggtatttatgccctgatgctaacctgaagaaggccttgtgatcctttgtaggcttgccgaatgatgaggtccgctgagaaggtacgggccatgccggatagacaagcgggttttgtgcggcgaggcagcgtgttcgtcgagacaacctttgtctagatctggatgtgctgaagtgcgtctccccctactagattcggcctgatgcttcttgtctttggcactgaacaacggagaacggcaagtacaggaaccgtactgtaatacgctgattctcaggcgagcaagcggtcggcggacgggtctcaatgcgagagtcagtggaagcatagccagattgttttcaacggtgcactccaccggtcgttcatctacagatcgactataattcgcgaccgtcaagattaatgcatgctcgcagctttgagtatgcaagaatggatctgcctacatttcctcttagctttaggcggtgttgtgaaagaggcattagctcccatcaatttgtgcaatggtttagtcggccgggtctcatcgattacaatttgtgccggcattctgtccctgaactatagcgttgtaggcatcgccatagctctcttcgttcaactcatacctcgaggggatcatcgctttagcgcccaggatcagattggtctgacagtctgcccccgtggtcttccggtacccgttggtcttgtagcccttcaaaggtactctctccatctggatatagagaagacggaacttcaccctgagccaggtcataaaactgctccaagaatgccaactgttgggaaggcccccctattgcgattttccacttttccgccaccctgtgctcaaacacgggatagcgctttcgcggaagccatcgattcttgaaagtagcagctgattgttcaacgtagttcatgtggtccatctaagcttcaattgttaagcttcaactgagtggcctttcgggcatctgacttccttggggaccatccgaatcaagaacggagctgggatcggactcgtaagctttgtttgcacttctggtgaaatccgatgggcttataggttgggacacctctggcttgtcaaattgatggagtggaagatggatcagtaacccacactttatgactttgctgtcgggccccttcatcgagttcttgtgccttcggcgaccccggtggacggcaagcgatctgcatctggaattatcaggggacccattttgggaggtctgagcagagcggtacacactgggatcgattcccgtgctcggaatcggacgaatcatactcccaaccccaaaacgactctggctgttcaggtttgacccgcacaaatgaaccggtgattgattcctcaaagcccacctggaaatggacatcggaggtgtccaacgcatgtcatcttgtgagtcgaaaaataaaatccctcgagtcctcggtgagcgtcgattttccatcttttctgctcaaaacatctagatacgtcaggctaaccaccccaaatttcgccaagggcgcttctccttcgagtctcgcccacttccaggcgcctgtgatgatcggttgcgtgctgtggcttcggaagcaaaattcgagaatggttccgttgagcatatccgttaacgttgttgtcttgtttgtccataatcgttaggaagtcatccgagttgcaaaacgatggcgcctactgaccttgagctcgagctataatcgccagtcacatagaccacagtataatgtacactccgtacgctcggtaataatgacagactatatcccccttcgtcaatactcggcaggccaggatccagaagcagaagaagctgaaggtccagctctacctccacctcgacgacggcgacgaccgacatcatggcggcaccccggattgatcgcctgtgcagtgatcgtgctgtttaccgggtttctcggtctgtcgtattcggtcacaggagacgaacagcggatacgaccgggtgaggataagggattgctgcatgtcgaagtacccgttagcggcaagactatacgagggcggcatcctatcaccgagttgattgagcaagccgaagatcaggctgccaagctacatgagctcaaggattcggtaaagactcttgatgatgcggtcgacaactacaggacgactttcggcttggatccaccagaaggattcgacaagtggtacgctactttctgagtcgaacgtattccatcgcatcagcgaatgagccaatgcccggctcgactcatcgtctgccccttcaggttcgaatttgcgacctctatatcatcaacgcacgtaccctccctcatccccgaggcacacctttccatcctcccatacctctcccttcctgcatcactgctccgctcgcgtgctctcgagcttcaacaagacaagggcgtcttcggcatgtctttccacccgcgatccgacgctcaggtcgaggccagtcacttggaagcgatcgaagcggaaggtctgatcggaatcaataataccgatttcatggtcagctacatgtcgcctcgatggtcagtccgagctgctcgccgaccctgtcgcacctatactgatgcgagagcgtaaacctaaacagggagtacccggagctactgaaagacgtcgtgaccttgattccggaagctcagcaatccgagtggcccttgcaaatgaccatgtgcgtacgtgatggggggtgtcgcatgagttcgggatggttgatggaagaggcgaggacgctggctcgagaagggcgaggtgagtcgcgaaagcgtttctgtgcgttgcattcctgggcaatctaaccaagagcattcatgagtagaatgggacgtgaacctgctcgagcaactcgagacggaatatatcactcgccggggctggtgtgtatacaatactgtgatttgcttcaggtacccttcaaacgaccgctcaccctgctttacaaacaggtcccaaacatgtaatccagctttggatcaacgactcgaggaagtcgaggtggaataccatcctctcaaccgatcgaccaagtctttcatatcggatcatttgcgagccatggatttctgtcaggatcccgacttgctccgtttagtaggtcccgtctgacacgagaaaagtaccgacgagctgaagatgagccgcatggcagaacggggaactcatcatggaaagcgatcatattatgagacctctagctcctatactagcagtatcaagggtgagcccgcaccgatgtgacccgttcttcagattgcctgctgaccgcggtccaacttcgaacctggatatatagcctatgcacgggtaggtcgaactctggcttgctcaaagctatctagctgacatataactttgatactgttcaagtgctgatatgcttggaacgccgactcgagcggtccgaggtcagcaggtcgtgggatacaatcggccacatgctgtgagcgtagctgagtcctctatctctcatcgacagaccaagcgcataacatcccatgggccgacaagaccgtccgcaggattgtctggcggggaaccttgactggcgcttttcatcgcgatcgatacgactggcgggcctctcaacgtcatcggttgtcccacctcgtggccaacaccactaaaagtcaagagacggtagtcttgctcgaacgtcaggacgaggacggctccgtcgaaatcgaagcgtggaaggagaaggaaatgatcgaaaagtggctcaacgttggactggtgaaaggggtaagttctggcagtcttgatgccattcattctcttaggctgatgacttcgtgacacataggatgtgcataacattgtgagtgaagcccgatacaatacctgtcgatgatacgatccgaatcgatcgggcaattctagtgcggacctggccccacggacgaagcctgtcgactcgacgggggcgagcaatatcctgagtgtccagagtacgaaccgtcatgcgacgagatgttgagcgagtatgagtggcttgacacgatgtcactcgaggagaccatcccgtgcgtccatggctggcgacatgaaattccacccatttacatcgaggtgactgattctggggatgattgcagttatcggtaccgcctggatgtggacggatacggttggagctctcgttggcagaaactattgtccaccgatagtgtcgtgctgaagagcaccatatacgtgagtcaaaaagcgatttggatcctgcttcacccgcccgtcactgacttgcgggctttgcacggaaacagcccgaatggtggaccgcccaggcgattccctggtatcactacatcccgttgaagtacgactataccgacttgtgggatatcctgacgtacctcgatggcgcccccgatgggtcttcatcgggtcatgaagatcgagccaaagagatcgcagcgaggggtttgagtttggcggagaatcatctgaggtgagtcaatgtgtgcgtcttttcttgctaagccaaggctcataaactcgagacgatggcaggtgggaggatatgcagagttacatgctcttgctgttgctcgaggtgagtcgccgggggtcctttgtcgtgacctccacctcgacctccaccttggagctgaaacgattcgatccgcatttgcagtatcgacgcgcatggtcagacgatcgtcaagcggcttcttacaaatcgtgacgttcagaacaagttgatcagggggatggttggatgatcgcatgatacttcggaggtggaggttcctctgaaacacatatgtagcatgtttccacacctttcgcgagctcataagcctacgaattggttcggcacgactcacagtcctttgtccaatgccgagagtgaatgaaaagtggaggtcgatgacgaagcgagaccacggtcaccatcatatgggttcatgtttagatctgatcccgtcgattggaatgaacctcacctagatctgaagagatataaacagatctgaacaacatggccattcattcaattgcctttccgatcaacattcctcaaccacctcaccttgtatcactactcgaaacgaaattaatcccgatcatcaacatgtccactattgctcaacgaaagctcggatcctccggcctccaagtcggtgccatcgggtcagtccggtcgtccccggaacctccacccgaaccagagcctccaactgacaatgcatatcgtcgcggggtatcgtagctttggagccatgatgatgacctggtgcgaccccaaagaggtcaagaaggatgaagacgcgttcgaggctatcaagtgagtgtccgtgacccgccctggagaccgagagagaccacggctgatcacgacgccgccgacctcgatcgacaggtctgccgtcgatgccggtgcgacctttatcaactcgggtgccttctacggcaactcgccgcatgagaccgccaacctcgagctcttgaagaggttctttgacgcttaccccgagtacgtcgacaaggtcgtcttgtccgtcaagggtggtgccaagggcggcaagatcttcagcgggatcgacgctaggtgagccggtcccgtccgaatatgtctcatcggatcgtggactctgacaggcatcgagtgtcgtttacgtagcatcgaaaacttgagggaagatatggacaggattcataaagctttgggcgacaagaagaaggtggacatttacgaggtcgcccgtgtcgacccttcgatgacgatcgaagacattatgaacaacctcgtcacgctcaagaacgagggccatttcagcgtaagcccgttgatcttcccgacagagttgccgacctgacacgtggacaccgctatctcgtagcacatcggagtctcggagatccatccggaagccctccgacgagctcatgcggtccatccgatcgcagccgccgagatcgagatctcggtgttcaacctccaacccgaagcgctcgaagtgatcaagatcgccgaagagctcgatatcggcgtcatcgcttattcgtacgttccgctcgtgggaatgatagacgtatcgtcaggagagtcaagatgagctgatctgagcggggtttgccggtgtagacctctcggacgaggtatgttgacgggaaggtaccgatccccggaggatttccctgcggatgatttccgacgagggatcccccagttccaaggggaaaacttcaagatcaacctcgaaattgtcgacaagttggtgagttggtcgggaaagaacagtaatatggcgaggtggatcaggttggctgacgatcagaatggggtgcatggttcacaggcggccattgccgagaagaagggggtgacttcaggtcaactcgctttggcttacctcttgcaaaagtctgacaaggcgagtcgcgatgacgtgcctatcctcaaaccccaatagcagccatgactaatcaaagctcaccctgatagatcgtgcccatccccggatcgggctctcctaaacgcacggtcgagaatatccacgccgtcaacgtcaagctcacttccgaggagacggccgcaatcgacgatatcctctccaagttggaggtcgtcggggatcgttaccccaacaatggtcacgggttgttgtggggcaagggcaagcaggcttagacgttcgcctgcaaggggaacgcatggatcctctactcggggtgacattcgggtaggacgagggtcgcttgtaatcgcttcatgacgtttgaaccggaggaaattgaatctcgtgatggttctcgctctacggatatgtctgaattgtcccagcgcagaggtcccgtcagaacaaggatgatcgactgttgaatgactgtccatgatcaggctgacaagctaaacagcatcatgaatagcatgaatagaggcgcgagatgatgtctggtatgcgttttgaattcactttatgcgttctcaaagcgagttatgcgttttcacttgttatcgtgtttatgcgttttcatttcccatctttcacttgtttgacgcgccggacgtgaccgtcgatcaacatgtcaatcatatcaaagtccatatagcgaccaacaactgcaagatcgtgatcatcctcaaccatcctcttgccctacgtacacataccatacagcgatacacagagcgaagaacaggctgccggtcactgccatgttcgcctctcgacataaccatgcctttcggggtcatcaacccgacaaggaaaacatgatcactcagacccctcttcgaccgggcatggctttcaagacgcccatgactcaacgcacgctccatccgtctacctccaagatgatgatgaatgacggtggaatgcatactgtcggacccaagcgcgtgcagatgagtgaaaaggacgggtgcaggacggaactcagacccagggtcgggccgagtttgaatcggaatggagcgaatttggcaggaggtgcgagcccgtttgcgggcaagggaaaaggcaagggggtagagcttgggaaaccgcaacagttgggcaatcacgagccaacgtccgggtttgacgtgaatctcggtaagtcgacgagcgggagactgtcgaaaggacgtctttcagcgatcacctcggctgatccttgttcccttcatcctacgcgttccacacggacacaggtcctaaacgccttttcaccaactcgtcccgcacgacccctctcaaacagaccgcccatcctctttcattccaaaccaacacgtccctcccacctctccattccaccccgttaccctcggccacccgttctcgacgccgatcacgtatcccttcgaactctccgcactcgaaccgcacgggcagcgtcacgcagaccccggcaaagaacaacaatacccaccataccgatttcttgcaaactcccggaccggccttgcagcgccaggtacagcagttgcagctacacgagactgacaagttcaagacaccttgcaggccgagctcatcttacaacctcgatgggtccggttatccttccttctattccccaggggatgaggatctacttgaagatgacgatgaaaacgaggacgaggatgggaacggccagggaaggtccggagggttgtctttcagggggatgaacatccaatcgggcttggataacggggtggaggcagggatggagatgatgcagttgaacgcacaggaagaggagcaggaggacgaggatgagatcgagtatatgcctcctcgtgcgcaaggtcagtcctcacctagtcgaatctcagtctctcgccatggaagaacaccgatcggctgaccgggagcacttgtcgatgatgatacagaattaccgcacgaacctcctttcagctacactccgctatcgaccatcggaaggggtttggtagagaatatccggggggactatcttatcggtgcagaggacgatttcgatggatacgtgaatggacacaagtgggacgtgctcgatctcgacctgggcgggatggacggcttgaacattgcagacgaggaaaagaatggattgacggggaatggaatgaggatgatcggtaagcctcgtcctagcggtctggcgatacagatcgagagacgagtccagggggggctgatccagccggattcgtcatccttcgacagactcggaagaaccgttcttgaggggcatcgtagctggcaagaagagacaagaagagaagagacggctggcacagagcccattgcagtcggattcgacagcggggaatgtcaaagcgagcatagaggagacgcgaacaaagccatcgactgctgcaaaatcgagcggatcggtcaagccgatggcaggcgtacagaacaagctggtaggacgagccgcagttccggtgaagcaaacgttgccgatccaaacgctgaagaggatgccgacggctggctctgcggtgtcatcgatcaagagaccggtcgtgggctctcgaacgggcgcgactacaacttctacctcgacggcttctcgaccccctacaggcatcactcggcaaatctctaccatgaacacccagacgaccaagacgaccggaaacacgacgactcgacttgccggacgagtccccctgcgaaccttgtcgaagcctaatgttcccgtgaccagcaacagaaactcgacctcgctcgcgcgttccaaatcggcggccatgccggctccgaccgttatgaaggaggtgttcgaggtgatggacctcgaactagagatgcccgatcaaggggggttgaccgagttggctctctgagctggttcaccatgtctcagcggagcacgaccacattttcctaccgtttctcattgttcgttgtatcgatttggtagaccagtgtactaagcgcttgaacgctgctcaatatatgctttgagatgtgtgcaatttgaattgactaagggcgtggggccggcgactcttagagcttggcagaatcgcggcccaagacacagggttgggttcgcaagtcgatcacgtgcatgctcgtcgctcgtttcacctttgaaaagcgtttttgcatcgactacgaaccggatcattcaatgctctacccctgaattggttctggaacgaccataccgagatgacaggaactcatataactactagacaaaatacagaaggccacctaaaacccctaagcgatacgatcattagatcttacatatagacatgaaccccgtcggttatattcctaatatgcacacttgaaaaaaattggaaacaccactgcctgaagcggtactgcccggatgcgatcggcactaggtaacggtcccatttgagagctgattgcgtgcacttggttagggccgacataacttcgaagctcaagaagactaacccgggactagtatcacggccgctgacattgatcagaacccaaatattccacctatacccgagacgattccgccgaacaattctgacgcctggttcccgccttgctccaaggcagtgttcatgatgtcggagttgttgatttcttggatgttagtgtgcacgagatttccattcggaccctctgccaggtcggcaatgtgatcgggcaagaaatcgccatcgttcgggtcgtcgtagaggatttggggtccgttctcgccgtcaattctgaccccttggccatcaatcagttggcctgcctgatcgaagacctgtatctggtttccgacagcatgaatgtaagctgctgccaggcagactacgatgctcccgcccagtatggcgtgaaccaaggtatgctgaatgacgggtctcataatcttcacaactaaaacctctacttcggaacggttgttgctggtagcgatagtgttcccagccttcattagagcgggttgatcccctacaggagcgaaacgggcggagttttcgatttcctttcctagcttcgttgttatggcaaagaatttcagctcggaagcttaccgcatcgacactcgaggcgcacatggctcgactcaccttttgattctcgatcttttccttgaccacgtcgctgttcctgatggcttggtccctttggacgacagcgtcttgcatacgcgcttgaatattgttgagcgcctcatttgcggcggccttggacgaatccagcggactgattggggccggtctctttaattagcgagattccaaccctcatcagctaggagatcactccttctgtataacgggcatccgactgactgcttggtacatatcaggcgaagcatcagataagtccaccgcctgcctagaagaggcaggcctactcccgattgcagtcagagtcctcgtcattgtcgcgttggtactgtaacgatcggtcaagcgttggaccgaccgagtctggacagcccggttgatcaaccatcttccggcctgtaggtggggcgtcaggcgacacttcttgcgttagtctaggtttatatctcatctcacctgtgtgtgagcttcgtagcctagaatgtttggctagtgatttcctaggagatcaggccaatgttgcgtatgtcgcccgaggccgaggtattgttactcacctgcatagaagtcatcgtgatcggttatgtggttgactgcgtatctgctcaacagcttctgacaagttgggcaaagaaatatcacaactttatacaactacacgagggtatgtcgcagataaggtcacgatcaggtgatggcgatgatatcactgaacactggatgcgacgccaaggttgcacccgcgcacatgaggatgtccactatttgtgaatcgcgatgatgttacgcaatcccgtgggaatccgttctcaccctggtcatcgaaaacgtctacgcctaccatcaccctcccgaggcccatggtgggtctctcatgacgatatacccgtctcccgccctcggcgattttggggactgaacggccgaggacatcgcaaaatgaaacatgggatatgcttacggcagtcgagatgaagtcgtcacgcgatctctttttgcttccgagaacgagatctcggccggacacttcgatcaattcaaaagagttcacggcttctatttcttgacagagaccgatctgaaagcgatgctcagacgactgagagcatgcggacattgctcgtagggtggacggtgacgatgctgagaaagataacagtgaagggaaatcgagcgtttgccagatttgtggcatacgcacaaactctggcattattaacagcttcctaaccttgctaactattcaatgggaagagtgattgttcgaggttcctgcatctctctttggcgtagaactctgtgcaattgttcttggcctttctatcccgctcccgccttgtgaatttccgaagtgtgtgcctccgttccgaagtgtgagcctccgattcgatttcacaaagacgaagcagatgacgggagcaatcttcgccctgaccctggtgaaccctattcgaccacttccttgccaagcattaacatatgcccagatgccgggggtcggcctggatccaagagggtttcattatccagttcaaagcaacgatagtccatcgttcttcgattgcgaatcacgaaacggtcatgctcatgggaaagcaacgttgcatactcggcccgaccatgtcattgttcacgtcgtcttctgttacattgtacgcgacgccttcttatcagccgcttaccaccacctcggcgttctgcttaatttgatgtgtagcttcgtggtcgaccattgtcactcgatctcctgtcctcggcatcagaggtccaggatcagacgaacaaagcctccgatcgaataggggtacaggtaggacaaggtcatcggacttccagtcgccggaccgctcttcacaacggcagctcagaagccaaactacttgtatgcccgggatcacagaaaaagaaagcctatcgatcacccgtgcgaaagaccactcgctataacggcgaaaaatgggacccgacaagagaaacttgctctcgtttcgcacgcatccctaggctgaggacgatcaaatgcggaaatccgtcacgtcctcgcgcgctacaaaagccttacaaagacgatcgagtgataggtataaaggaggaaggtctacacggttcgagaagcgctctgagacagaataacgtggtactcgccgaatcggaccgattctatcgccacatgctgacgctggacttgttccgaactgcaccgttctcgtccctgtccacgatcttggccttggacggtttaggttcccagatcttccagaactgtgtgacagtctgcagcatcagtcagagtgtacgtcggacatttcgggaaggactcactttgagactctcgtccgcagctccggtcaccacggtacatccatcgggactgatcgagcttcccaaaatcctcttgtcgtgcgcgcccgtgacttcgtgaaccttgctcagcgaggggtacgaccagagtgtccagtgattgtcgggatatccgtgggtcgacatgatctctttcgaatgattagaccagacgaggccggtgacctgcgatgatgtcgggagggaggagacccgagcgcccgtcgtcgaggacctggggcgtaggcaggtcagtcgctgctcagtcaagtgaacaaccgacccggactcaccagaaatgaatcgtctgatcgctagtcccacctccggtagccaacaagctgttttgccatggacaccaagcgagagcctgtaacgcgattgacgatgggatgaatgagcgatcggcattatcgtctccacaatgcaagtccgactcgccttgacagcggccgtatgattgtgcttctgccattttggaccctggctcgggaggctcgattcgttgttgatgatcgattgtccgatccggccactgcaagtcgaggccgtcagtcgctattcgagaaccagcgatgcacgtccgaagaaatgacttactcccaacagttgaccacgttgtcgttccctcccgacgccaaaaactgtccatctcccctccatgcgagcccacacacctcggcactgtgacccttgagttcttgcactttgtgtgtttgtaccctgacatcgtggtgccagatcgatccgtctctgcatccagacgagacgaccgaaccattccacgagagcgagggcactcgagcctgattacgcaaaggggaaaccattttgatcaggaccagagcaggtttctcactgaaaccaggggtggaggacggggtctcgatgaaggcttacgagatgtccagtcatgtttctcatccgcttggcagtatcgacgtcccaaatctcgacattgccgctctcgttccccacggccaagtacgatccgtccgacgcccaattcaaggaggtcaccacgggtaattccgtctccctgtccaagtccccgaggatatgcaacgaagtctgtcagccttgaccgtacaatgacaccccccacaacccattccctgtcgacccctagccgtgatttgtcgacatgactcacatcgatgtatgcagacccgtgacatcccccgtctcggcgttccagatgtaaacggtatccacgagcgcgatggccaccttgttggtacaactccaactgatcaaattcaggtaataatcgtccatgaacccgggagcgtccaacacccgatccggcgtctgggggaatcgacgggtggatttcccagaaagcgagttgttggggttcgaatgggaaccctggccgggtttaccgggggtgagaccgttcttggcgtattgacgggaaagcgacaagtgggacgatgcgtgtgggttgtgggaagtcgacgagggaggtgcggcggcgaaagacaagatccgggtgtgtggagcgccaccagagggttgttgcgagtctgatccggcggtactactcgcaagggagacgttggtcatgtagtcgtcgtcgttggcggtgagcgagtagttggacatgtcgcccgtacccgctgcgagagccgggtcgaccgaggatgatcgcgaggggatgaaacggtcgagctggagtcaacaagcgggtgtgtgagtcgagtccgaaaccaaaggtaccccattccgtccacaagttcgaaaggttcatcaagcgaggacgagacttacattccttccggtagagaatttcatcccacctgatcctcctccgaaagctccccggtccgcctctgaacggtctctcccgcggtccatcaccccgtcttctcgatccccgacaatgtccatgcttccacctccgatacccatccccgatcgactgtgacccgacatggccgaaccggggcgggaggggggtcgtttcatcggcgaggccgtaggtctagtgatgaacgggttcgtcctgtcgtgggcagcgaggtcgatcgcgcagaaattgagcgagatgagaggctgtcttgttgatcactccgactcacagatctcctttgctaccaacattgccacctccgaaattgctgtccatcgtcatgttagcgtgtcgattcccagtgccttcgagtgcaagccggaacgatagggcaacgaggtttgatgagggggacgtgcgatctacttcaaaggtgttttggtcgtcacgtaatagcgaggacttaaagctggatgagagaagacaaaggagatgtcacggtggttggtgtatgcacgtatgcacttgggtgtaaagagttggttgaatgatcatctacaccgaggtccaatcaaggttgtcaacaaacaaaacactcatctctgccaattaaaagcgcaaaagaagcgcatgaacttatgacgtaaagccgccgtacaatgcatcctagatgggtttcatcttgctacagacatgtacacaccctagcactactgctatcctgtactacccgtcaaaagtacatcttgctctcttgccccatctgtaccaagtccggcgccacttcttccaacgtcgcaccgtcgtgcacgttccattcgggtttataagacgccgcgtcgctggcgaaatgagaaatgccactcgattgataccaggcaaaattgttggccctaaggaggaaatggcgagacaccgagagaagattagtcgaagaatgcaggagaccagtctatatcgacactcacgccatgggggacgtcgtcgcgagctgcgacatgatctgatccacatgactcgcctcgatgacgagtagctcgtacagcgcatctgaatcacaacgacgtcgtcgcatcgtgccatcagccattcatccttgtacttccctcaactcgctctcccgcacgaccgcaccgtcggccatgggaccctgttactcacctttaggcaccctcatccgatcatacctcatcgtctctagccgacaagcagtcctgaccacatgaatcgtcgagctcgtcaaggcgtccaactcgcctgtcaacccgttgtaatagtgcgaagcggacgacgatgaacataggctcgataacatgccggatatcttgaggcaggcgttgatacacgcgtcgttccgatggtcggaatcttcagagagggagaggtagatctcggataccccgatcaagagccactgaagcggtgaggacgacgacgtcagcaccgagtcacgaggttgctctgttgccggcagaagaatagatcgaacgttcaggagattcatgaagacaactcaccagatcgtacaacacaggatccgccctcccggacctcaacatcgcatcgaaactcgtcttgacctcctcctgaatcgccgcgtggcacgctgacaactcggcgtgcttgatcgggttcccgcgacgcgtcaacgggacggtgtgatgcatcgggctggcaggcggggtcgtcgaattggggggcgtatgcgtaagagcgacaatctcagaaaacacgacgagctgcggtaaaagtgccggggcgggagtacgtgaggataggttttgtgacggccgatacggtcggcatcggcttaccagctggaccttgagacgtctgatagtgagataaagacaaaagagcgattcgtcagtcggaacttcgttactttcttagtgtgcttgagactccgtccactcacgtcgtcctgtcaacaaaagcaaatgacaagggcgttacgtctgattagctagacgctcgagatgcatagtgatatgccgggctggacgcactggctctcgaaatcttccttgggcatgttgatgggcggaggcgtccgatgagaaccgtacaacttgcacggaggagggagaaacgcgccaatctttatgcggtcgatcgtcaatacgatttcagaatggtacagaatccggaaaagccacaccacctaccgagctgggccacggcgtccagatcttgtccaagtcgaccgggttgtcggtgttgtccagaccgacactggcagaaaccgtcagccgaacgatattccacctggattgagcagggcgaagcaaccgggatcagtgttcttccctcacattcagatcgactccgataggtactgaccaaacgtcgttgtccagcagcaagagaccgtcctcaggcctaagagacccgtgtcgcatatctctcggtcctacaaacactgccctcccgatcgatcctttgggcatggagtcgacgcccttgcggtgcagaccgaattgaacggcatgtctagggtcggagtggcttgttaggccgctacgattgatcgggacacagacccaccagacacttacagatacagctctgacatcaaaaaccaggcctgtaaaaacattcccgattccagcttgattaaagcgagagcgaccacttcggtgactcaccttgtgatactttccaatctcgaacaacgccgtgacaatcagcgtccccgctgcgagcgcttcaagccaagtgttcggccgcgtcttgatctggtgataatgcgacaaggcctctctttcgagcaatttgaatagctgttgccgctcttggctcgtgtgcaatttggcccagagcggattccacggatatgctatcatggcctgcagagggggtgagtttcgtggctatcaaggtaatttattctctccagacccggtacccactacggctgcagaccaggctcctgattcgctcctggtaatggcatcaaacgtgctcgcaggcatcttgcgcagcatgaactgtggactctttgccaagaaagtcgccttcctgtaatcggcgcaaaatcgttaggccatcacctcggagatcttgaacaaccggccgtagacgtacatttcttgccgaaacttgacattaaagacgagtgaatgcaagtccggtcgcggattgctcgtctcgtatggcaaagagtacatctcctgcccggctcccatcgaggcggaggaatggttggatcctgtgcccgatcttgagtgtaaacgatgtctctgtcaatgccccagcggccaatcagcatccactgtgctcgtgcccattatcacgaagtctcaccgccagcgtgtcacaaaaggcctcgtgctcgttgatgatcggtaccatcgtgtccaagggatctttttctaatgcggccgagtgaacccgtgagacgggcctcatctccacattatcgatcatccccctgggaaagtgatgtgccagtccttccaccccgttattgctcttcatcgtgtaaccctcggcgttcccgagactgctggctccgaacatgaccggcttgtcgtccatatttgatgatcccgtgctaggtcctgagctgttgtcgatcccgaagggaaacgcgggcggtataggaaactctcccatcgactgagcaaagatcgacgcatctggtacggggtgataagaatctaccgagctggggccgaatgcatggatagggaggaaaggttcaggaaagatactgtccgggtcgggtttcagacctattctcggaaccgaaagaacgtcgcggtgatcaggaacgacctcaacctcggttgcacgcgagcgtcatcatgcgtcaagtgactgacctaaactgggcaacgactgcttgtccttctcgcctgcgtgcgggaatgacaggatcggataagcacgtcggattccaagggtgatgcgaagagacgtctgctgacgacccgactcgcctgacgatgacgagtgcttccgaacatcatgatccctctgtcgtttatacgaagcgatcgccgccactagaaatcaactaatttgagcgaagcggcgtcgtgtctgtttgtgtgtcgaaactaactgctctgaggaacgcattgtacccccttctcattacatcggctgcaagggtatccgcgacaccgctagaattggcaaggtaggagaagaccgaacgcgatcaggtcagcgtagctcttagtaccgatgacctcaagagggaaagctgtacctgtttggctctgttggaaaacgctctgataagccaagctacttcgaagacgaggaagaacgacccgaacatactgataacatcccatgcatgatttccctttgctctgccgcttcaacggtctgccgacacaaacacccatcaacgtgtcgccctccggcactttcgaatggatctcatcttacttgctcgaatctttgcaaggcgtcgatggactcatgtcagacgatggtgcggagtaattggcggattcccattcctgaagtaactcaccctgagttggaccttgagtacccgcggctagaagatgatccgaagtgaaaagcgatccaccattgggcttcgacaacagtccgaaagccgcaacttgctgcatcctggcctccgagcttccgttcactgattcgcacgtctgtctcgagactcggataggcggatggatgaaattctagatgacaatgtgagcgatactatatcatcacgctgtttgtttttaacatcatcgttgaggcatgaggcaacaggttctccttagcaatccggattaactacctcaactagcctgtgtactagacgtgcatgaccggatgattactgcccggcaccagtcggatctgaccatcagctgtgctgctccactctcacacgcctcttcatttccacccaggctgcaagctgccagttcccgaccgcaagttaactttttgctacgtcaatcccggatgaaccatctcctcccgttttggtagggcgagagtgtggtgcggatgagttgggactgtacacgcttcggctagatttcatactctaaaaaccacgcgagtcggtctgaggaatatgctgccgcggctgcgaatcacgggcgcaagtgaccggagtcgaaaaaactaaaatgctcccttcctcgcccagccgcctgagagacgcgtagccttgaaaaggttgctgtagatagattcgatcgcgacctacaaaggccctggtggggcttggataaaattgtacaaacgccgagactcaattgttgcgctctactctcgggtttccagcatactccaaagtttgcatgcagcgctcgtgaaagggtggtcgttcggtcgtgagagacgagagatattccagtaaatgccaaaatgcacgtctgtccgtcttgctcgttaaagtcattgagttgtttccgagatgcggaagaatagggagcgaactttccgagggagggtgggaaattggcggtgagcgatgagaatggttcaccccaccatcaactcttcaatggggtcgacatgcgaagtcgacctctgctcgaaagggtccgatccaggcattggcgacgaaggcgcgctcccgacgcctccctccccgttctcaaagtcgtggaagagccaatatcgctggcaaatcatcgtctgtcaacgtgcaaaacagcgcgtcaattattttgccagcaacgcagtcccgagctgccgaaagcacgctcggtcgcatattcacgcaactctaaactcacatcgacgaggttgagagcatgtccaatgtgatgcatggccgagtccataccgccgagttttacggacgggaaaaacagcgtaggagcaaggcaggtcgccagattgcggggcgtcatctggttctcctcttcgtgatcattcacaagatcgagatgctggatgacccgtcggagtagcgcgaagttggctggaggcaaagaccagatcaagctccgaatcgcatagagtcgatcgttgcgctcaggtatctctgtagagacggcgaaaaataccgaatgaattatggatcgtcatgcctgtcatgtctctgtccggcttactgtcggccaggataaagtcgtaataccgatcgtcggtgatcaatgactctcgcatagatgctaaccactttttgaaagcagaggtaatggtggtcgggtccgcataagcctcatcgtgggcgagatccgggatacggcctgagatcaagaagtatctgcgtcattagctgcctttctagctccccccatccgttttatatcgggttgacttgcctgtaacaagctgtcggaccaacgcgtcgactcggctcaatgaaccgggaatccggtacaagctggaccaacagcgggcgcctcgtttagcggatatcacagaaccctccttcctcaattgctcaccctggctcctcaagaaatttctgttccaggattgccatgcaggcctgagcagcaagcggtatcgcggtggaatcaggctccggaccgtggtctctggccagctctgctgccagggtcaaccgcatggctggaggaaaggaaagagatcagtccgagtcgtgaaaacaaacaacccagtccacctacgcaaaaggggtagcggttcggccacctcattgatagtcggctcgacaaaagtctttcttctaaggagagccatctcagaagccttgttggcgagatccatccatgaacccaagtctgctctagatttggcttgcaggatatgtcggagcccttcaggggtaacgatttcaaacacgaacgaccggttggcggacgggatggcctttgcttgacagccggccaggttgagcgtgagggtcgattctttgggcgtcttgaactcgagactaccggtcgaacgaatgagaccctgcgaattgcttgagagcaaatccttgggagtcacggacatcggtcgggacgaccaccaaaaggcatcgctgacgtgctttttggctttaggtgtcttttgatttgcgctcttgctcatcaaggcgctgtactcgtagcccttgtttgccatgcgtgttttggcctcgccacgatgtttgagcagttgcacgatcgtttgcatctcgcgatcttgtctggcaatttcctggccgatgagagagccgaatatcgtttggtacagaacgaaattgcgcccggaggggcgctctgggagatgctcaacgcgggaggatacgtatgatcgatcggcgagtttggctagcaagcccccgtaattcgttgtaaggcttgtatccgctcgagcgtagtcctcggccgccacgttcacgacttcaaagatatgactagagaccgtgaccgtacagctcgtcaatgagcacatgactgaagcataccagccgcagaaggcgactcaccgttgcttttcaaagttgatcatgaagtctggactctcggggaaagaccagactatctcggccagacagcgcatcagccaacctgaccaaaggggtagtttaagcagttgagcgaagaaagcaatcggatcatccatttccttacatatgtcaggcgtagtgtcgtgtcgtgtctcggcattgtgtctcaatcgtgcgatagacaagatgcctgagagatcgtctgcgcgccccatgaaaattttgacggcgagattccacatatcgacctctagccggactgctgggtcgagcaacacttcgctgaccaccgcttctacgaagcaaggcaccgtgatactggtagaattggccatcagggctgaaagcgatgctatggaagcgcgtttctcgagcttctcggcggactcggggtgattagaccttgcgacaacctcgaacagcgccgctaacaatttcgctcgtggtccaatgtccatgcccgaggcgattgttagagcgtgtactagccaggctctggtattttcgtagccttccatcgcaacttgcacactggggggtagcagatctcgaaattgagggagtccatgagccggcgctccaagccgttgtcgaaaagttcgatgtggagagctgatctggacctggtgacgttcttgcctggacctcatcgggaccacctcgcaaagataccaccctagggggtctcgagattgctgttcgataaggccgcatacatggtgaaggtcctattgcaccgaggagatcggcagatcagctgggttagctagtcggctcagatcaagaggactatacatacagtcgcagtgatattgcaggtagaggcttctccgatcccggccaagattggcaggagcttctcagcattcgaaggtggagaatcgaggtccacatcgaggtaggctggatctgtgacggatgatgaccggtcatcatcccgcgaaaaggcttggccaagagatggctcagagcaaagtctcgtgctcgcaagaatccgtcccgtcagacttgcccaccaatcccgtatactctcgacgatagcgtgttcctcgtcggtacggacacccgaatcgatgtgttctgtctctgagacgaattcggacattcgtgccaaaagctctgggtcatccaatgccgatcgcaactggtccccaccgatcaaccacaggcgcagcagctcgatgacttggttccgtatgtagcaagacagctgttcagaccgtgacgattcatccatcatggtaatcgcgcccgtcaaccatcgaagcgcagcagacgagagttctgctcccgcaggcatgaccgcctcccccgctcggtagaatcgttttttcagcgactgtcagatgagatgaaaatcagtatgtaccttttcgatatttctttgttgagggcgaactgacctcgaaaagcaacgtcggttcgagaaaagatcgatacgttgcaaagaatgtacgacggtaaatatccaggtccattgcaaacttgcgggcgtacgcgaagtgtaaaggcatctgaccattgtcgtccgagcccagactatctccctcgatcccacataccagaaggtcgatcaggcgctctgtcgatgcatacttgatcgtgacgggcaaataagcggttgaaccgaggcgacttgtccgatccaatgccaggctagagcgagcccggctattcgtccgagacaaaggtagcgtatgggccgaagcaccttcgggctcgacgacctgcagctcaatttcttcggtaatacgaattgtagcattgtgaagctgtcctgtgattcggcgtacggcgttgccgatgccttcgctcttggcagtctctccttcgcgcaacttttggcttgagttctcgctcatactgctacgacgactgggaagcgatattcgccgggccgaacgaccagtgtccaataaagaggggggtcgacgggtctccggtcttgccaacgctgcagttgaggcctcatgtaggttagatccggtcgcaaacaatgtgtttatggggagaggggtggtgtatagcaacggttgaagtgctgacatgcttcgaccttcagctcgggaccaagatcttgaggtcgattcactgagcgcgggcaattgaatctcccttgatcgggccatccagtatgacatcggctcgggaggattgctcgacttttcatatatgctgattacgaacgttcggacagcttgattttggttgccgagcgttgcgacatctgaccttgtacgatcgagcgatactagggcctcagctagcgagtcccagctagccaacgcctcgccctgtttctgtccttcaccaggaaggatggagccgaggaagggtatcgcagctgtggtatatgacggtggtacgaccggagtgtggaaaggcaaagtacccgtatggctgtcgcctgccaagctctcccaagccgacattgtctgctggtctacattgggcactaacctccaaagccgatcaaggcgaagaagcggcggtgaatagagcgcttgacatattgctgcaaaagtggcaaagttgcccatacatcggcaaagttccgccaagtttatccaagcgacgagtcttgcgacccgatgcgtaagaccattcgacgaatcctcgctggagagaacatcccgcaacgccgcgctggtgaagttcttgggacgcagtccgtgggaatagaatggatcaagttcctcacgaaggtcgacccgagcgtcaccacttcctcgcgctagctcaagctgaatatgttgaagcctggcagagagcagatcgaagagggtttccgccaccgtttccagagacaattcttccagtctcaagggtcttgatcccactctggcagtgaaaacggtgccccgggacatcatcacatccgtaccgccgataggtttggcgtcttccgggttggtcgcatcccattgtgcacccggacagaactctcggccggtcacaagtaaggaatcgatggccgacgaaaggggcttgcccggagctttttgactgatcccgaaacccttcaccaagacctcgaacgcgagttggatcctcgccgtaaacgccttggttcgtatctcttcagtattcatcgctcgatgtagacacttgtccatctcgcgaaacaacccgtttagatcctctcgatcgcggtgcacgagcagaaccgtaacaaggaaaaccttgtaaaagtatacctcgattgtgtcattgtcatcccgatttgcctgttcaaattgtgttgcaaagaccaattcgtgggctagcgcttcaatcgtccccccaaggatacgcccggcttgaccgtgcgtcacatctggcttggtcttcagttcaggatgtcgcgtgataccccagaacactcgctgggccggtcgacggccatgttttgggccgggaaccgacccactctggaaatccgagggcgattcggtctgagcactctatatcagcaactacatacgacagctcaacaccatgagcccgtgcacttacctcttgcacgatcccagttgggaacagggactcgatacccgccctcttgtcactgggaggcttgtagaagtgtagcttggttcccttgatcacgaccttgtgtgccttccagtttctcgaggcctcggtttcctttttgaacgaaaaataatcctctccgagccctttgattacgttgggtgacggcgtgcgtccggttctgccatttcgcagagcggctgggttatgtttgagcaagaacccttctttatgaatgacttgcgaagttcttttggcattacccgatggtgtacggatcaagccgccttcctctatgcgcagccccagctgatcgttgccccggtctcgaccgacgtttaattgcccggatcgttgtctgtcccgagcagtcttggtgccgatggagattccaccgagcaggttgaatgactggctgcggccgtgaccagggtgcggcttgagtttggtgttcacaggtgcaccacgagttcccgccgtgctcgagtcgctctgcgtcgaagtgctcccatgaaaaatggctggactcgacgccttgcctccggaggacatctgcctttcgatctgtctcggcaagttttggttctctgtctcgtgatccttacccttgatcaacccggtcgcgccagagacgacgtctagcagcattttcccgctaaacgagttggtctttcgtctagctcctcgtttcctcatcgcgacctcgtcctcaatcttggcattcggccgcccaatcaggacgttctgtaagctttcccgactgttggatcgtatcaaatggctgaccatctctctcgacttttttctgcctagggggttaacaccgtctcctgaccccgaagagatgggtacgctcgcgattggagtgtgcgacctcatcggtccgtcactcgtcggcgcactggcgctgctgactactcctgagaattgcctcgagctaccgagcgagggagagacggggaacgacatcatgctggcgctcgtcgggatcaccggggacccgtccgccgttgagatccccaaccctgcaccgtcgccaaacgttccgtagtgatccactgtggagatggaaccgggtacgagcacgatcgattcctttcgtagtccaccagagaccaccttgtgtttcggtttcttttccattcccagcagcttgcttagatcgtctacgctccgcgcccagggccgtttcgacgtggacccaagtccggccatgctggtagacgatttccctgaagctgacctggtcccgctttcgactccaccaccaccacgtaagaggtcggtcgagatcctcaaccccgtgcgttcacgctgagtctctgcgtcagtcggcataaagtcggccggaggtagacccggggaagatgacgagctggacaaggtgggcgattttacgggtgggacagggggtaccgggggtaattctgaccgatcgaagaggggggagatggccctcggttctggagatccgacggtagctcgtcttccccaagttcgaccgggagaagaacccgtctcgctccccgtcacttcttgcctcgaccccgccgattcaacgagcgtcaacccgagactctctggcgacctcgagccggatctaggagagagcccaccggcttgcaaggtggacatcctcgccgtcccgttttcccggtgtacgaaattactagggcccgagatgactcccttgctcatcctgggcgaccccttacctgacgtcactcccactccagcgagaccttgtcccatctcgtttggactgtccggcgatttcgacgactttgcggtgtgtttgtcgtctgatcgattgctcgagccttctccacgggatttggaacccccagagaaccatccgaagcctttccagcccgatccggagcttccactttggggcaccgtcagatgctgctttgacgtcgaagtcgagctcaagctcggaccttgtctcgaggccgaacccgacgcgtgcgatccagagtcccgctcgttcgaacccgaccccggtcctaagaagcgatgtagcgagaggaaactccccgagttagacatcccgttccctgagatcccatgggcatggcgtggagagggttcgagcacaatagtaggcgagctggataggttcctctttgactccgctggtctcgatgctggcggttgctgaaaacttggataggtcgggatcgtcgcagatgatgtgtcgtcagatgggaaagagagtccggacggggtggacagcggagatcgggatgtcttgtttttgcgcaacatggtggttgagatctagcttgaagtcgggccagtaggcggagcaattccgaacggacctctgacggaccgacggcgttcgaaagaatgctgtacgtgtgcacgtacagataccaaggaggcttcaccaagatcaaacgagcagtagatagttgcgtcagagtcttgtcagctttcctctcgtcgaccctcttcgctgtctgtcccggatcaccaggtcgttccagctctcgacctgtacgtccttcgctacgttctttttctctcctttttgagccagctctgacggaggacgtcgtacgatatggaaacaggcgaaaggcgagagggtcctttcgaacgtcctcctttcgctgagcgacggcccgagcaagtgtagggggtcgtccgggctgtcctgccgaaccgcaagacgtccctttccagtttgaggactacttttgttgtcgttctgagctacttcaagtacgtttcgagcggcctgaatacggctggggccggagcgtatgcctaccactctactatgcacccttttctgctgcgacgatcggttgaaggacgcgtgcgtggtttttgatgatgacgaagagctaccaactaccagctcgtgcggcctggaggtggagccaatctcgttttgatcctcctttccctgatattgatcacgacctgcttcctagacttctaaccagcgttgaccggcgggttatcgacctcgatagtgaagtgcaaagccgctcctgtttttggtttgctcgtcgaccatgcatgagatttaggtcggtcaaaatgttcgacaagtagctgatctctgttgaaccggaggatccttatttgatgacaacaagcaaagagcgatcaaaagctaaagtcgcagtttcggctcggaattgatgatggcgatggtgatgatgccggttgttgatgacaaacaggtgacaacacggcaacgaccacgacgacccacgaccacgatgcttgatgtcgctctcacgctcaactctatcccatcattttactctagatctgattagagaagattcaatcgctgatcgccgttcgatcccatcaatcctctctctctcacacttacccgctcgcgagacaaaaacaacaaaacccgaccctgtgcttgtccttttccttgatttccctctcgctgcttccgagctcatataatccgcccaggcacgcttcacacggtgtaacctcgtggcgtcgtgttcctcgacccaccgccaacgacgacgaaatgaccgagatctagcgcggtcaatcgtcgcccttccctctgcactcgcccgctgtgggatggatccgatggagtggcgtttcgcgtcgttcgtttgtcgcctttccattcaaagggtctgtcactcgccgaggtcggtcgtgataagggtgaaaccgagatccttcggtcgatcggatcgctcgttcgatcaggaccgtacttgaggcgtcgtcaacatcggtcgattcggtggagggcaagaggcttatcgatcaggcaaggacgcgacagccgagggggttcggtgtatcatgtccagagcgtattcaattaatgcgcacgcgcgcgtttttgagccaagtttacttaggcccatagagtctagattctgtggcgacgattctcaaagatcggctttgtcggaggacgtctatcaccagggaaatggttgagcctcgttcgtagagcccagaccagtgacagaccgaggtagtcgttcgggcgggtctcgcttctgctccaatagccaatccaatgtcaacggagcggtgaccttgtcaacatcctcgcaagcgcggtcgacacgtccaaagtcaagggtcttatcgcggaccgatctcgaacagctggtccacatatatacgaagacgaacctcagggtcgcacacctgattgtgtgcggaaacgctgccgagtctcaaagcccagaccagacaacgggttcgtcctgaacattcagggataccgctcgtcgctcccctcggccttcctgatacccgcgaggccatgaccctaattccctgaataccggtggcatgcttcacaggttggagtcggggtacacacagtcggcaaccctgggcctaccgattcagcagagttgcccttgatgggctttctccttttgttggctggttgaacgtttaaattggacgaggcgggggacgatgcagagcctgattgggtgatgcgaggatccaggaggatgaggtttagcgatggatctagtgttgatagcttgaggcagacatggtgtatgcgtggttgaatctaggttgtggaggttgaacgatatagatagatagcgatcgatgcaaagacggggcgcggtgcagagcgatcatccacgacttacaatcacgagatcaaactaggctagctcagcattttgacaccgacatcgtctagcttcaggctgccaaagtggtcaaagtcgtcatagccagacgtcccagtatacgattatagagccaactggtctgctctgcctgtctttattgaatgtggtatttgcagagcaccttgacatctgatcctggaagcccgatctaggtggccgaagagagatacgctgcatattggtgtcgaatacgttagggcggtcggcagcgagatcatgctatgcgctacctgtcatttgccgttcgaaagcgaggcaatcggtcgcacggggcgcgctcacgggcacctgtcgcatggtcacaaaaacgcgtctgctaacacgtctcgtttcactctttgacgagaacactcggtcgagtgctcacaaacagaggcggagaaaacaccctggcagaaacaggttctttgacatctctcgatggattgattgctagcgatacaggggggtcaagacgagaacagacatgggtaaaaataaggtaggggggagtctgagaaatggataatacgggcgacgagcgcacgtcaacgtgagctagatggctatcgcttgtcggcattcgcacgtctgtatccccaagggcatctatcgttggtttcttgttgttgttgtggtaatgacggggcgatagttgtttgcggtagaccgaagcccagaccgatcgcaatattgtagacgggggtggcagcgcggatgggaaaattaatacgtcgccaacgggagaagggatatccgagtctgattcagagcgcgatggcgacaggtgtcgcctctcttttaaatgtcctcgtcctgagcgtcggcatcggtgtcgacgttctgcctctgcttcctagcgttggcgccgagagccttcttgaacccctcaagggtgacaccgccgggtacggcctggtgaacgctcgactttcgtcccaaatcggctccaccctgcttctcctctggctcgggggatccggctctcgattcggcgggcgagccaaagacggaatcggcaccggtcaactcgtcgctccccttgctcacaaacttgcttcgaccgctgacggacgaaaacgagtttgcccgcgaagcggccggggtgacgaccggggtggcatcaggagtagcggccggggtctttcggccctgaggctgctcgatcctgatcctgaacgtgttggtctcgccgttccacttggcggtgacgctagaaaaggaaaagtcgagacgggaaccgggtcagatgagatgccgacatcttgcggagaatgggctccctaactcactgggacaagtcgctgaccaaaaagtcgggcttttccttctcgagctgttcggccgtgtgcgacgtgcaggtggcgaggaccatggatccagcggccttacccgccttgataccggtaggcgcgtcctcgacgaccaacgaggaaaagggggaagccttgcatcccctagcacccatgaggtatgggtccggagcgggctttccgttggtgacggattcggccgtgacaaagacctggggcgtggtcagctcggcgatgggcaacgccttggacgcatagaaaaaggtggacgacgtgcagacggcccaaccttcacgaccgccccgggattccttttccgagctgagctgctccaacaggttggctacgccgggcaaggtctcgataccctgaccgcccgagatggcggccgactgagcggcgttgaggatggccgtctcgaatcgcaagacctcggtctcgaggagcttggggtcggtgatcttgcaccatttacgcaggacgtcaatggttcgcataccgtgtgcggctgtgaggcgtggagaacgagcgtcagtcgaccggtagcggaaagcaagtacacgagcgggtgggccagcgcttacaggccaaaatgtcctcgaggtccaaggggtaggtctcggcaaacaacttccaagcgacgacgacggccggggacgagttgatcaaagttccgtccatctgtaagaggcgaggggagaagtcgggaatcagcacaactctcatcgcgacgctttccgactgcgaaaaactcacgtcgaacaagaccgactcgacgtcgatctcgatgatgtggtcgtcctcgctagacatgtcgaacccgggcgtcgagggacgggtgacgacggggctgtcggagggagtgggcatggccgacatctgcaccaggtagcaagcacaggtggggatgtagcgagttgaggagagcacagcaagcaaaagtgtgaagaggtttgcgaggggaacggaagacagacgagtgggggcgcatggtcggattgcgatcccgaagtaggacgaagaggaagaccgataagaaggacgaaaggacgagacgagatgaagaagcaaagccgaggaaaaaagaagaagaggactcgtcagtacatcataccctctctgcgaggacctcgacaaggtgcctctaaaaggcctgcgggggagggggggcactgacctggaaagcttctcgggtgaagacggacatcctggctagattatttcgaaaaggttttcttctgggtactgttcaaggtatcggggtggtctgtatgtagcgggtgttcggtctgattatccaatggggtattgattgatgatggtcgccggagacgacgaaagaagccaacgaggatacgagagaagagtgagaaggtcagcgatccgacgctctacgtctagacgaacaacagtcgatttcgattcgtagacgtagagagagggtcggaaccgtcgacagtggagcgtgcgacgacgacccccacgccaacgatacgggcatggacgagacgctcaccttttgttatgtgattcaaaagtcgtccgattcgtagctttcccttgaggtcagagggtggttttgttagatgagagtgttttttttttggttgtagtattgtaagaaggtaattgtgtatgggtagtttgatggttgaataggtgaataaagtcgaaagacgagtcggtgggtggttggatggttggattcggtcaaacgcgcgagggcaaggtgacgatgggaagtttgggatgtctctcagctgcgaggcgagttgggaggggggactgtaatttttctcctaccccccctcggagcatcatcattcactcctcagcccccgacgagcagcgaccacgaccacggaccaacatccgtcctagtcccaccatcgtgacactcattcacctggagctcgagccgcggtgaggtgaggtgaggtgaggtgacgtttgggggtaatcgtcattttccaaccccctgttttttaccttaattggccgagactgacaattacttccgtctctttgatgagcttttttggagccgagacagcgagttcttggcacgtgttggtctagcggcaaaggggaagctgcagggaaggggaagggtggagtttaagcgagaatcagttcgatgatgatgatgacgtggcaagcctcgcttgcaccgccttctttccgccccgcgccatcgcaaaggtaaaagctcatcagaaaagaaggatttctagggtgattcgtcacttttgacctctgttttcgagcttgtaaagtcgccgactatgcacctcttgccgccccgcgccctctcttgctccgcccctttcgccgtagaaccgagcaagccagatacgtcagaaccaattcgactacactttcagcaccagctactcttacccgcactagtcaggtcaccaggtcgtagccttcctccccccactctctcgccgccacacagatcatgcatgcatggatggatgacctcggttctccgcgcgagtgaaagaaaggaaaaaaaattgtaatctcgtgcgaggccagcgagcgaatgctgcgctgcgatgatgcggtggggtgggatggggttaggggaagggctcgggagcgtgcaccctggagcatcctggtcgtcgtacgtcgtcgttcgttgtactctgctgctgcccagtcgtcatggccgatgtgggtgcgagtctgcggctgttgcggtccagcgcccccctgccatcacccgaccgcaccaccaccaccccgtctctctctctgcccagattttgatagatggtcgaggtttgtacgccttacctacctcgatctcatttactttctctgaacgtctctttccacacacatcacacaaacctactcaaagaaaccaaagttaaagagactgtatccatacccctatccacacaacacccatacaaattcgacctgcacacagcttcttgaaagaagaataccagaacgacacgcaccaaacaatcacacgtattttctcaatttaaaaaacgaggaaatttcgataatctacaacaatgaacaagctcgcccctctctcgaacacctcggatgtcgatgccccctcggctcagtttgaagggatggacattcattcgaatgtcgtcactcccggtgagcttgacctgagtggcatgatacagagagagtgagaggacggtcaactgattgatcgtggtttggtcgattttggtctggtctgtgtcgtgtcgtcctgttctacccccccccttgcagacatcacccgcccttcctctcccgtccaagccgcactccctaaatctcaactcccctcgggtagacacaaggtcgccatcgtcggctccggatcgttcggaaccgcgctcgcaaagatcgtagccaagaacgtggccagtaggcctaaagagtttcacagcgaggtcaggatgtgggtcagggagaagatcgtgagtgccccagccgtgccccccttcaatacatcgtcatacccagagcctcatggcgggatagctgaccatttcgcccaaaaccgatccgtcctgccgcaggtccacggcaagcagttgacaaaggtcatcaactcgacccacatgaacgaccggtacctccccgacgtcaagttgcctagcaacttggtcgcagtgggcaacttgaaacaggtcgtcaaggatgctaccatgttggtcatggtcaccccgcatcaattgtgagtcctgcgtgcgtgtccgcgtaagtcgtataggtcgagactaatgaccgactcgtcccccgggcagcttgtcgaccgtcctggaagagttccagaccgacggcgtcatcaccccaggtgccatctcgatctcggccatcaagggtgtcgaggtcaacggtgccgacatttcgacgtttgcgacgttgatcgaggaaaagatcgggacgccttgtgcggcgctcggtggacccaacgtcgctcaggatgtcgccaacgaggtgagtcccgagtcggaggtcgggcaggtgtcgtgagagcgtgactaatcggatgacccctccggacggtgacagcaattctgcgagaccacagtaggcgccaagacgcagcaagagtgtgaactctggtcggccgtcttcaacacgaaacgattcaaggtctcgaccgtgcaggacgtctcgggagtctccctcgccggtgccctgaaaaacgtcgtcgccctcgccgccgggttcgttgacggactcaagttgggaagcaacaccaaggcttcgatcatgaggatgggattggccgagatggccgagtttaccgtcgagttcttcccagggtctaaaaaggagacgtgagtcgaggggcgatcgttggctgactgtgtgggcggggacacgggtctgaccccggcgtgcgtattgtagcttttcggaacccgccgggatggccgacttgatcacctcgtgctacagcggcaggaacaagaagtgcgccgagatctttgccaagacgggagagtcgtgggaaaagattgaaaaggtcagtccccgacgaggcggcggcgttggcggcgaccatcgaccatgactgacgttttcttgccatcgtagaaccacctcaacggccagctgctgcaaggtaccttgaccaccaaggaggtccacaacttcctcgtctcgcgaaagcgaacatacgcctaccccttgttcgaggctgtctacgccatcagtttcgagggtcgtcccgtcaagaccatcatcgacatctaatcggccggatccgcacgagaggaccagaagcgggaaaggaaagaagaaggaaaggatgaaaaaaaccccaaatccccacaaagatctaattcagacgcatccgtctgctcgtcgacatggctcatacccatgcagacgctctatacaaaggctccgcctcgacttcttttcttgtatccagtacgaaaccgtctttttaccttgctcgtctaccttttcccacctcccaggctatggcgtcgtcgccggcacccagacgatgaatgtcaatgatgtggaaacatgcaatgcagatagatgcgagcgagtgttttgccggtcgtacatcgttgttcttgtcatccgcagcctgcggatctgtcagtggtcgcataggcaatgtccatttcaggtgatgtggttccaacgatttgcttccgaaatttccaatttacttccgatatcgtcgaccgattccgcgattagcaacgccccggtacaacacgcttcggcctccgggactagcaataactactactatgtcgacgtcgtcgtcgtcgtcgttggtcaacctcgtatcaagattagcgattcgggaccgcctaagtcggcttgctcgtcgcttttcactgtcgctatcggacgacgaagacgccgcgggacattgaccctcgacgaccgagaccatgttgacagcgtccgtcgtcacccagtcggggcccgtcctgctagagacctttctcaggcattatttcagtaaaaaggccagcaagtcgtccatcgccagggaggaactcttgttcgatgaaggtcagttagtgacgacactgtacacgaacaccttctcgttgctgatatcgatcgccggtcccggtcgtcgtagcattcgtcctcgtcaagacgtttttggaaatctcgaccaagtgagcacgacgttgcgacgagacgacggtcattgtcaattggacgagagcgcgatctgatcaccctgctcgacataccataggcacaccgtcgaagacttgcaaaaattcgggctgaccaagacgccctccccaccatgggtcctgcaacaccgagtcctcatccccatcaacccctcgtgcgtcaaggccgcagagatcctcgtccaagcgctcggcggacccgaggtggccactaaaatgtctggaggtactaaatggtggagagtccgtatgcaggccggggtggagggtgagtggatcgggatcaagaaggatttcaaggacgaagaggtcaggcgcaaacaggccgaagagggcaagaggaaaaaggatagacatcatcgtcatccgtttgggatcaagagggaggatggtaaaaagcacgaaggagagcaagacgccaaggaggatgctgcgtcggatgacggagtcgagggggagtgtgagtcgaacgatgcggtagacgatgtcgtgcgagcgctgttactgatttcatcaccttagtcactcccgagatggatcacttgcgtgagtacacattggacgggtcttcgtgggctcgacaggatgctcaaacagctgcttaccggctacaggctgtatactctacatccatggaggtcagttcgtcgttgtctccgccgaacgcgttcgtgcctttggcttcccggctgacccgccacacccgtgaacctgcaggcgctggctattggggtagtatcaacactcatcgatacaccatctggcggtacgcacgaaaaatgcgtggacgctgtttcgccgtcaattatcgaaaggcgccccagttcccctggccgtgcgccctacaggattgtctcgccgcctacctctacctgatcaaccccccaccacacgcgaaacatcggcctgtcgatcccaagaacctgatcatcgctggggatagcatgggaggaaatctagccctgtcgtgagtgtcaaaaggggagccaggttgtttggcgggcaaggaccggctgatgggaccgtcgaccatgtcgctcgataggctactccaagtcatcagggacgccggattgccgaccccagctggggggttattgatctcgcccgtgagccgcgttacgagccgaccgctaacgccgagatgacatactcaacgatcttgtcctagtggtgcgacttgacccattctttcccgtctgtgctggagaacaccgcgacggatatcgtcccaccttatggtttcatccatgtgggtccaataccgcccccacgaacactcaattgagatactaaaccgagcatcccaccgatatgctagcgaccatctacgctgtggccaccaccaccgccagagctgaccgaggaggtgcaggaaagcttgcggagcaaagttaaagacgccgtccatcgaatcaccggaagtgccaagcgagtggaagaagcagcgaatgctacacccgaccctgaaaagatggactcggcgacgaccgttcccgatgctcctcccgccgacgaggagaccacggccaggggggacactatcctagagaccgatgacaacgaggacgaggcccataaatccacgcttttccctgccaccgaacgacatccgcatcatcacccgggccctacaaccgacaagagagatcgacggccctcgatgagcgatcccgccgccaacaggcacgccatctcgctcgatatcgatgggcagcacatcaccattcgaagccaaattcagctctactgcaccaacgatcagctcagtcatccttacgtctcgcctgcgctcggcaacctcgcgggtttgcctccactattcatcattgccggggacaaggaggtcttgcgcgacgagattgtgtattcgtgagtgaggatggactacgtacgtacgccgtgcttcatcgagctgaattgtgcgggacatctcctttgcagagcacacaaggctgccaatcccgaccgctatcccatccgcgaagccgtcaaaaagatgctaccccagctccaggacctcgagggcaagtatcctcccaccaaggtgcacttgcaggtctacgacggcgcttgccacgtgcttcccatgctctcattcacggagccagccaaacattgctatcgagcgatcgccagctggtgcaagttcgttacaagtcgacatcccgagtcgaagcgctctgccgatctcaaagctcaccaagacggaccgcatcctcaattgtccatgtcatcgttggatatcgcctcacgccagcaatcgttctcgaccgaagcggctccggaagccccttccgtcacggcaactcggacgactcctggccccccggcgctagcgcccatcgtgataccgagtgacggaggggatgtcggacggcctatctctgccgtttctgggacattcggctcggccactgctagattcctctccacagaggcgtacaagacggcgtctcctgctccgagtttgctccagcgaaaccacagcgaaccgcagacccccgacttgacgagttgggagatgaccgatggtgaagtttcccggccgacaagtcctacaggaaacaggacggatgaggatggcccagaaggtaaggctgacttgcatggagagatcaaggtgccgaagaacatccccgttggtttcgccggcaactacgagatttacagctcaaaacatgtgcgtgccaggtcacgcctgctgctgtcccgaccctggccaagtaaaactttcaatctatgacagggtggaccatacagagataacatgatcagggaacgggtatccgtacacggcgaatgccgccccttggaaaatccagaagaattaccagcattttcgatgccgttggaggaaatcggtgtggtcaaagaagcgcaggtgagtctacacgttgtacttgagccgaatctaggctaatcacaatgggatcaggcggagcgataccttagaggccaggtgagtcccacaggaaaatatttctctctctgatattgacccgaggctttttcttgtcttagaaattgtgggatgaaaaggtgagccgccttatgcccatggacaccccctttttttgggattccactcacggtgtctcgtcctcttcagtatgccaaatacgcccggcgcgcagagagacatcgacaggagaacctcaggaaagcccagctggacggtccaaagttggagaaagagttcagagacaagatgggcgaacaggtcaatacggatgaaccagagtctgaaaggcaatatgtcttcaacaacgagttttcctggacgtgggcgcttcaaggggagcaacctccaccttctgcagtcgtggggcgtcgggacacggtaagtcgcgcaaagtctcattcgattctcgccaagactgaaatccgacgtgatcgccgtcagtcggaagcacgaaagctggcggtctacgccgaccgcatgacggacgacaagatgcagctcggtggtctatcgctctggacggcaatggctggtatcctcgcgcccaaccaagcagcagcaggtccaggacagcagtctgatacccccagctcttcgagacccgcctcgaccagcggcaagcctagactttttggggggctgggacgccgcaaagattgatttcagcgcagaacacatgcataatttgtacctatcagagacgcggtagacattcgtaaaggagatattcgtacagcataattcgattcatgctcatcgtcagagactcaattgatcgtaaggggtgattgcgcccgcaggtgttcgtttgcgctcgacctatcctatccggacgactttttaccgcccttcccacgcgatggcggtttcgttggtgtggcctgtgtagacactggtacggggctaggcaaatctaaagagatgctcaacttctcaaagctgcgagagaatacgtcgaatgagcgttcttggttctttttggtcaaagtcgccgacggctcactcgagttgcaccggcccgtccttctcattcgcttccaatatgctttgcaccccatcttgcagaattcgctggatttcgggcgggatatcgatgctggtcgagcgtccagccggcatgccggacgcgagaccagccttcatgactctgttgttacgacagtctagcccgatgccatccaaggtggcgaccacgacaccacttactgcaacgccttttgtgcgaggttcttgtcgagactgatccctgtgagcgtcttgtccgccaagtgctgcatctcgctccaaactatcctcttgtcctcttcagtctcggcgtgcatatacgggcagacaaaagattcaggctcggtgccgtcttcgttatagtcctcggggatgcacgagcgaccgagtaggttgttggtgcacacgtttcggttgaaagcgttgattcgcagtgaatactggtcgggcgcgtgggaatcaaaacagtcattgtccgccggacaaccgtcctcgtccaagttgaaggccgcgcatggatagccggtcttgcctcgatgcaaaccctcgtccgggttgactgttgtggcaaggcgttctttccagtatgtctccgaatcgtgccgctcggcgatggcagtaggcgagtcgactaccatcggaaccttgttctgcgtgacagcaaggttgcctgccgacgagccggcggtctgacaaaggatacgtctgacctcttctagctcgttgatcgaggcctggttcgttggttcgagcaccagtaccatgttcagatctgatgcggacggaatgtgatcagtagctattcaagtcactcgacgtatggtctgtcttacctatctccgcttcgactagatggccctgacctttccgcgcgagggctctgcggaatagcgctttcgtgtttctatagatcgatttcgagcagatgagaaacgagccgttcagcaacgcagactaggcgtctcactttggattcatgtgtatgcaaaaggtgcagtcccgttcggctgtccggtacctgagtaagcgcagggtcgactacggtcaacaaggtagcagcggattttagttggtggaagcgtgcttactttttcagtttgatgagtgggagtgaccggttgagaggataaaccacttcacaagggtcctgaaagagtaaaacaaaaagtgagcaaatgcaaaggcatgaggctacgcgtgagcaaggagctgaccagttgcatcgcgttgctaaaatgtttggctgcccgttggaacatcccccgcttgtatgcgccattgcctttttccttttccctctcagccttttccctctttaattggagctcatcttcgaaatcttccccgatatcgtcgaggtagcgattgatctgtagggatcttcatgagtcaaattggatcgcgggcgaagacgaagctttgttcgggacaaacctggttgatattcctcacgggcttgaaactctctttctcgaacccgggttcaggcttgtacagcggcaagagcccttgataaaagtcctgcaagcataccttgtcagcagggagacgctcgcgagggagtctttccgcgccgtacctcgtcatatgcccgttccatgaccccgatgacatccctcgatgccttgactagatcgatttccatcgccatttgccacagcacgtcgccagttcgtctctgacacgccttgagctcttcttcccagtcggtccgctcgatcgccgcgaccgtctctttgctcaggtattgcgctttgagcgctctcgctgagtacatgaggaatgcgtggtccggcggagaacgtggtaacggtcgaggcgtcgtgtttggtatcagtctggatgcgagaacttttaggcatggtcgacacaagttcaacacgcatgcgcatggtggtccatgcgtaagcgaactaccggtgacaaaattatgggtaagctcgagtagtcctcaaccgcgctgactgagctggacgcacctgtaaccatgtacatcaccgcaatatgccaattcttctagcaccaacggcgctgtagaatcgaacaacaacctgttccgattgccacatgatcagctcgagcgagacatccccgctacaccggatcggcttactccttgctcaaaccctttactgctcgaaggagttcgaccctcatctccaatctggcttccgggtccgggtagtctgatagcctgaaaggatgtcgtctcctctttcgtgccgctcttccttcagcgtgatccccttcgggaccgtatggcgggacaggagcaaagttgttggtaggtccgacgtagaccttgcctagcatcgcgtccctcatcatctcggggatcatctgcttctccagctcggccacttcttcgtagaatacgataggcaggtcgtgcaatttgagtcgtcggataaagaggtcgtgtagcgtagcgtaagtgttctcgagagatgggctgggttccttggaacaaaaacacctcggcgcccgagcaggaatgtaagccgtgggatgcgtatagaggatacaatccgggctcattgttggcggtcttgtgggatccatcacggcattggcaatgtcgttggcatgattgcacttgacgcacgagtgggcgtggccgagaacgtcgtgtgcccgacctttacccttttggaattgtttgaacgccttgcgactctcttccggagtaggcttgttcacatcctttttcgccgaggaaggtttgatattccccagcttttctggagacgacgaaactgatgagttggcagatgaaactggtgagccgttggctttgggaattgtcgtgggagttggcatgatcgcaatctcccttgccggtcgagaggtcgtttgcgctttagaccatcatggcgagcgaaagcagcgctgaagggcaaggaactgggatatgcgcaactggcaaccgagttggctagcactatcgtggcgagcaactgaactatgtcgatgaacagcagtctagaagtcgaagataacatgtcaaggatcaagtcaggtcacaagcgaacacatcagatgtccttgatcgcggagacgaggtcgggcggaagcaaaattcggagatttggaattcgacctcgacttggacttgaaatgtggagtggaatggaatggttatgtgatggaattggcctcgaaaaccatgtatctgctacaataatgtgtctggagtcgatcgcaacgacacgcagggataccaatcaggtagattctattatgcttgattcaccttggggtcctctatcgtgcctgttgacggtttagccgtaacgacttgctcgtcctcatcatcacgagaccgattcttttccagggctagctgagccgccatcagggttcggaatcgaccaccgggccgacgtgcgagttcagagtatcgtccgtcttcggtgatcttgccgttctccaagacgacgatccgctcggcacgtgccaaggtggccagtctgtgggcgatgaggatcacgctgatgttctggctgcggatgatgtgatcaagagccgaattgacggcgtgctctgatgtcgagtccagggcactggcgcaaagagtcaagaaagatcatcaggcgagtctttctcgacaacaaactgccatgctgctcacctggtggcttcatcaaggagcaatagagaaggcttgcgaactagggctcgagcgatggcgactgagagaaacggcaacgttaacttcggcggtagcaccatcgaggaggctgcgatcgcttacttctttgcttttgtcctccagacaggctcgctttgccgactactccatgtcaccgcattagctcatatgatcgagtcggacgtatctttgcgatcaaactgactctgcgtgtcaaagccctggggtaaatcccagataaagtcacagttggccatcttggctgcctcttcgacttcttcccgagtagtctgctcgcgaccgtaagcaatattcgagtggaccgatccggtgctgagcatgcccgtcgtcaactcgtcagtcagcaggtcgctatagcaacgcgcggtctcgataccgctcacaaaagggtaggatcttgcgagacgacaccgattcgctctctccacgattcgggggtaaattcacggatgtcttcgccatcaaacaagatgcgacccgtgttgggatcgtaaaaacggcagatcaatgcctggatactagactttccactcccactcgggccgctgggaacaaacgggtgtcagcctgcgtacgatacaaaataccaagctcgctcatacgcacgcaatggcgagactggtgccgacctcgatctgaagatcgacacccttcaagacttcaacctctttcctgctagggtaggtaaagctgacaccttcgaaacggatcggtccctctcgacccttttcgagctctttgccgaccgaaagaggaatggccgacttgcggtcgagcaggtcgaagactcgggttccggctccgacacccttcatcagacccgtccagaatccggtcagaccggaaacggaaccgccgacgtatctgggggaggtagcgatataagcttcgagtccggcttgcttctcgctattccggccgctcacccagtgtagatcagcaaactagtcagatcaccgacagagatctcggatctcgacacaaggtgacctcctacgacattgacaagagcggtcagctactcatgatcgaaacgtttcgtggcaccgacttaccgtaacccagcaagcacagcatggccaagttccccgtcaaaccggaactgccgtaaaagataccactggcaatggcttccttgcgcatgagctggaagacgtcatcaacttttttcgcaaacagtcgggcttcgatcggttgagcgttgaatgacgcgacggtcttgaacgcgtttagcttttcctcggcggtctgtcgcagggcaataaaaatcagcacggcgtgcatcaggaaggcgacgacactttcaggagcttccaagagcgaccacccaccttcgacatttctcccaacgcttcctgagtctgcttgctcagtttgcgcaggtaacgaccatagatgacggcaccgatcgagacgggcgggacgacggcgagcatgactccggtcaacttggcagatatcatgaccatggcagcgactgtacgggagggatgagcaaggtttttttttagcgagacgtctccgtggcaggacgcatccacggtcgaagctcacctccgacaacggcagatatgatagccctggtttgttgaacacacacggtccgctcaggtcagcccagagattccctaatcgtgacatacatcgacgacccggctcacctcagaccgtcactcaagttgctggtcagactttctccgatgatactcgtatcgatacccaaccgactgacgatatcccccgcacctcgatcggcaaactcgggttcctgcctcaacgtgctcaggtaagcctgttccctgacccgggcgacgatccgacctccgctcaaccgcatcaggatcgctcgacccgtgttagctcctgctcctacggcgaaggtcaaggcgaggcaggcggcggcgacgggaaaggagacgccgaaaaagtccgtttgaggggaagagaaaaagtcgatgagtttgccgatcgtcagcgggatgagcatggacacggaggaggaaaccaggagctggacgacgagagcgttcgaagtgagtcaattgtgggaggaacgatcggctatggcgcttaccaatccaacggcaaacgtcagactccgcttttcgggcctggccaggtcgataagcttcttgaccgaggcagaggacgtgtccttggggaacaaccgggtcatcaaggtcttcttctccggcgccgatatctcagaggatgccgctactacgggtgtagactcgggagtggtcgatgtggaagtggacaatgtatcttttggtgtcgagggtaccggttcagaagggttcactgtggattctccttgacccagctctttgcccgtttcccgttcaatctccttgccgaccacctccttgtcgaccgcatcgcctcgctttgtactcgtagagctaactctggcttgagtgtgctcccaccgtctagaagtaccaaagcttgtggcggccgatagcgttgaaagccgtggtgacgatcgaagggtgtcgatagtcgaggtggtgggaaagcggggagagctcttgctcgtaacaaagctgtatgcccgaccagtagcgcttgaagcaggccagactgtccgtgatgtcactgtcacagccgtatacagtcagtaagatgagcgggaaacagtatgatgtgccgctcgggaactgacctcgacctggaatctcggccgaaaccgcactaaaccacctcctatcgaccgctatccgtgcaccattcccagtagagatcctccgtgcgcatacattcgatcggatggctgttactgctgatatggaatcctgtcggaccgatcttgcgctctgaatcgttgtgatccggaggttgttcatcgggtcaagacttcagatcactacgggaacgggtcgtcgaccccgggaaacgctgaacttgcgagaatcgaggttgtatgactgccggacggattgactttgaggtactgctaattcagatgccagacggcggcgaacacttttgctgatgcttatcggtcagggttggtgattgacaagggaggctaactgtgacgagaggtacgggtcgacacgacataatatgacctcgactatatctggtccggggttgatcgatcgatttcgtgctcgcaacgcgagaaagacatgacgcgcatttcacccaaagcaagctaaaacgatcgagaccgaccgatgatcatgacaaaagtacgtgcgaccaaggcaccctactccaaccgcattgcaatcagactaggacctaggaagataggagtaatcgagctgcgagttacaagctgaatgtctgagcatcgatcgattgacggtcatgaaacgtgtcatgtcattcaacgtagcccgagtcgcccatacgaccctttataacaaggagcccgccgcgagtccttctcatcctgtcgctgtgcaacaagactcccactttccttgttgcaaactcatcaacaagacctacaagctacgtgtctgtctatctttgcaatgctacagttgcagctgtgaagtcgatgaccatatatcgaggttggagtggtaaatgacacgtcatcctcgtgtcatctattccttataattcccttgcaactcggtgtgttatcaaataaataactctcctctctcatcaacgacctctcgtttccagtatcatctatccatccatcatatcgtcgttgaacttgcaaaggctgattaaacgtctcttgtttccccaaaatccaccataagcactctacgagtaacactctcagaatcccaaaaaagaaagaccaaattgaagtgatctcaagatggcgctcaaaatgcccaagggcggacagatgcaactgtttaaggatggttacaaggtgagacctcccaccgtgacctcccagcgaagcccaaaatgtttactgattgcccggcatcttgaactctgacgcacgatgttagaccatgtccggaatcgaagaggcggtgatgaggaatatccaggcggtcggagagttgaccgagatcgtgcggacgagtttcggacctaacggtaagtcgatgcgaaacatgatgggcttcagctatgccgcaatctccttgtctcgggcatcgtcctgattagattcctgcgcttttatgacaggccggaacaagctcatcatcaaccacctcggcaaactctttgtcacctcggacgcggccaccatcattcgcgagatcgaggtcgtccacccggcagccaagttgctcgtcatggcctcggaatcccaggagagcgagatgggtgacgctaccaacttggtcctcatcctcgccggagagctgttgaaacgggcagagaccttgttggtcatgggattgcacccgagcgaggtcatcctcggatacgaaatggccgtagcaaagggacgaaaggagctcgagggtgagtctcgtcaaggccgccgttgatgcgagcgtcattgtggatcgttcgctgatcctctcgagacatactcccccgctctagacctcgtcaaggccgagatccccaccccgctcccgaccgccaagcaactcgcatcgtgcatcgaacccgcgctcacctcgaaacagcccaacgcatcggaacgcctgtcacaactcgtcgcagaggcttccctggccgtcatgcccaccacgccgaaagatttcaacgtcgatgccatcaggatcgtcaaggtgctcggaggaggtgtcgagggtagcagggtcgtacgagggatggtctttggcaaagagcccgaaggtgagcatgggcgcgtgtccggcggctcgacacgctttgtatgctgatttaaagttgtctcacctggtccggaccaccaggcaacgtgaaaaaggcgaccaaggccaaagtggccgtcttttcgtgcggtctcgatatcgctcagaccgagaccaaggggaccgtcctcttgaaaaaggcagaggagctcttggacttttcgcggggcgaagagaagcagttggaaggggtgagcacgagcgagaccactgtcgactttcgtgcactggctcatcattccacgctcgtttcgtcatgcagtacatcaaggagattgcagactcgggcgtccagatcgtcatcgccggaggtggaatcggcgatctcgccctgcactacctgaaccgattcgacattgccgtcatcaagatcgtgtccaagtttgacctccgtcggttgtgcaaggtcgtcggtgccacccctctggctcgattgggcgcgcccatggccgaagaggccggattcgtagacgtctttgagacgatcgagattggtggcgaccgggtgaccgtgttcaggcaagaggccggggagaggacgaggacggccacgatcgtcctccgaggcgctaccgccaatcatctggacgacctggaacgatcgttggacgacgggatcaacacggtcagggtgctcttgcgggacggacgactcgtacccggtgccggtggagccgagttggagctcgccagacgggtggcagagtacggtgaaaagacctcggggttggcccaacacgccatccgaaaatgggccgaggctatggaggtcgtgcccaagacgttggccgagaacgcagggttgaacggagaagataccgtcagcgcactgtacaaggcgcacagcgagggcaggatcgatgtcggtgtggacatctcgggagccaacgacggcacggttgagaccgtcaaggccaacattatggacccctttgccgccaaggactgggccattaagttggcgtatgtcgggagcgtgagacctgtcccgggtggataacaagctgacgcacgtttgtcattgcttgcagtaccgcggcggccgtctcgattctccaggtcgacagcatcatcgtgtcaaagcaagccggtatcgctcctcccgtacgttaagaatcgctgcggattcgcttgatccaccgcatgacgctgacgccgctccgttccacttgctctcgcagaaacaaagcggcaattgggacgaggactagttggaaccacagaggaagagttttttctggcatagacacgactttacgtctttttcgcacgatctcgctcagttcacgtcggatgtaaattggtccatcatttcacccgtcaaggggtagatacaaaaggcatacaatgcaaaggtttagcgtgtggtccggagtgttgcgcctgactttgcgcttgggcacgatctacatttcacaacgtggtgagctgcaggcagggccggtgcgcagctgctaatcgtcaaccataccgttgtgatgtccgcaatacgggactttcataacactttcagaacgagctggtccctatgccagacatgaccgagcagagaggggactggttgtcaatagaacaggtaataatcacgattacacccgccatactctgggctttataacgctgtcagtcaattgatcctaccagttccctgtgattgtgtcagccattgcgcctctcaccccgccggctctcctgccaatccagaaaattacgggaaatgatcgatttacacaggacactcggatcctacaggtatttgaaggagcagattgtgtcgatcggtaagatatcaagcagcgagatcagtgctgcgacaacgtctagacacctgtactgacaacctgacttcaccgtacagccatggcactaagaggttccatgaggccttcaaaccaaagtgacatgattcgtacatgagcggaacgccccgcaagtactgaggcgtgggactgaccttcgggctgttcatcgagcgattcgatactcactcatcgggacatcaggattcgggtttcgtcctcagcataagagttcatgcgcagtgtaatgcaattttcatcctggctagcttgtgaggttattgtcgagtagaaagaacaaaggtctacagcaaatacattcgagacttagacaagcgacatgctgaggtccccccaaatcaagacgtcgggttcgcctaaacaccttgctgcttcttgcctttcaagacctcgctgatttctctccaatcgcactcctgtagaaagggcatatctgggagcacaacaaggagggcattggccacagtctcgagctgatcatctttgaaattaggttcaatgccatcatccttcaggttctcttcccacatttgcaagtgcttgatcaagttgcccagacgctgtttgtcagtttcgccttccgggctcatctggcgttccacggccaacaaaatgacgtaagctcgagaggttcgaacgtattggcccccctccagctcaggaggccacatgaattgcctcgcgtggggtagttgctctttccctgccccctcccgagcctctcgctgcgtcttctcgtctgaagtttcggggtagtgactctctgcggtttccgtcaattcttcccaatattttaagcagttggtatagccatcttgcaactgttccgcatcgccactggaagagctagcttcaaatgcgttcttcgatttttgcaacaaccccttacagccccgtcgaaattgctgctcggacacatcctgcgttggggtgggtacttccgagtcactactgtctgcgccccctgtgaattgtgtatcgatggtaaggtcttgcatctccaaagtttgagcttgtgagcggacgagcggtctgagtgactttaagccacaacaaaatcgcagcaatcatatggccctggtctgatgcatagctttatacaccattggccagccaatccatattagttggactgtatctatcgaacagcttacctttcatccaggccgtctcggcgcattcttcgcagtatagagaatcccacagtgaaaggaatgaccggcagggtaaagagacatcatccgatcgaatcctagcggcgtgcagccacaagctatcgccactgcacttcaccactcagatcgccttgtcgaatcgagagtgttcgtgtaatacaaagccgtgacgtagaacagtatcttacttcctttcatgctcatcaggctcggtagattcgccggggaaatagcgagggaaatatctatgaggttgctctgggcagcattgtgtgataacgtgataagcggtagtctcagtgagctggtggtcacgttatcttggtatcaaaggaggcgaaaggatgaatgtggacaacgacaatcgtccaagtactcgtagattatatgcggtcagatggagtcgtatgcgacttttggtcagttgggctatttcacgtcgaggtcaatgtcgcactgattcgacaggtctgacctctgcattttgctccctctgcatgtcacttatcatcttgagtgactgctgataggtccttccagcctggtcatatccacgtgaatatcacactcaaacagactgcgaagctctcgacaactgtccaaataatggcatcatgtcgtcgcttcaaatcctccattgatctcgaataatggccaccgactatacacaaatgataccactccacaacagctgaggaccgatatataccaccgacaagcagcactaatgcgagtcgcaagcttgagctagaagcaacacatttgagagtttggcgaggcggacgatctctggcgaacactcgaaatcttgtgccggaagttccgtcccttcttcttcttctgcttcttgttccatcacatctgacccttcaggatgttcttcttccgcggatacgtcttcgtctggcgcttcaggatcttgttcgtcggtttggctaggtggttccttgacatagaacccgcagcacgggacttccgggttgtccacctggcaactcaccgttacttcgtcactagaggtatatactaacaagtatcaatacggtgggcgccagaatggatcggtaacaacgatagccctcacctgcaattttgacagtaggattctgaaggattttttgggcgacccttgttagtgagcgactgcagcgattcgatccaatccagagactaactttcgcaagtataacactcccatcttgcgccgtagatttgggcgagttgacactgcgcacaagagatacctggatgtgctccaagcatcacagctgcattcacaagctcagcatcggactccatcgtatataataggtgttgatcttactcagatccgccggagtgcgctcgcttgttgcgggaccgtcgtctccagggtgagcgaagatgaaccacgtgtgttcgggatgtatcaccgaggcgcaactgatatatacgtgtaggatcaggacaggctactccgatcgtcgccctcttgtgtgctactcacctgtggcaatcgctacagagatcgtctacaagatatcacggagctgtcagacttggcgaagggatctggtcattgtagagagacttacaattcgaacattgtttgcacttgtaacgtttccccgcaaatgcttcgttgccacaaccatcacacacaacaccttgatgctcaataacggggctgacttccggttgaatcgcgatatctgaagtttcgtcgccggtttcgtccgttgtctcctcaacgtgattttcggcatcaagtacggggtcttcactaggatcttcatccgggtcgacctcatctccgggctcagcgtcatcatctgcttcttctgctccaagtactgaaccttgttcttctgtgtcggcattttctgactcgaccgtgtcctcttccacttgaaagtcgtcatcactggtagattcagaattcgcttcgtcttgttcgctattttcgtcactgtcgtcgtctgcctttgtgtgaagcgctttcttttcctcctgggtccattttggtattttgacggtaggccgctcgagatccgtccatcgatacgtcccttcgcccatccatttgtcaaatttggcaacctgactcacgccttcagggtagtggaagagataatcggcaagaatagggaccgacgccgtctggaccgcttcggtatcttctcgctggtacctagagtctatttatatcagcggagtggataagcaatgatccttgaacacttacccagaaagctcgtagaagagttccgcgattttgttatgcgcttgtttggcgtctcccatcgagcctaatttgttcgtatgggtctcgagatcttggacgatttctttgagtggacgttcggcgggcctctatcgggtaacagtgcactcagtgatgtgatcgtttctgcatcagcgaaccacccacctggacttcattgccgtcgacgacatccgttccgaccgaggattcagtttcgagctggaccggcttctgtcgaaagctgcattaggctttcagctaccatcgtcgatgggcgatgctatccaacatactttgacaaaaaggcccagcaatccttcttcagctcgtcatctaccttgaagctttctcggttcaacttgcaccataacctagccgcgggaaggttgatctgctcttgatggccatcggtgcatacagcccaatgcaaacacaacggctcgattttgtatcgtctgacaatctcgatccgctcggctgtattggtctccagcaacagattgaagagtcgaaagaccttctcgacgatgtcctccctctcgatgtcagggctatagagagacaaacgcgtcaagtacacttcttcgacgctccgctggcccgtaatgcttacttgacaaagatgatgactagacgtttcatgacgaggtcgatccaagggccatctaagccttcaaggagaaccagcaagacctggagggtggcatcttggtgttgttcttcttcgagatgacgcaaaatgaccttgatatgtcgttcgttggtgcactttgctttcgcttcggggttcgtaagatagaacttgtacgtcaagaacaatttcgaagcgtcatgaaaggttcccgcattcctgattgtccaagacatcagcttgcacgatttcgaagatgatgagagagggtcctcaccgaatgatgttccacagcaattcgtcgtcaccgtcacggaagaagattggccagtattcgggctcgaagttgctgataatctcgaacgtcctctcttcgtacggttcagtttcgtcgagtagcaactccatgcgcctccttaattcgtcgaccgcgccgaccgtgtgagcgaatcgttgtcgacgtttacgcagattttgcttgtccatcgcggttggctggttgtcttcgttgagaaagtgagaactttcatcgtccgtcgctacctttaggatgaggtcgatttggaggacgagattgccgcgaccggtctcggcttcccgctgccaaatcttgaccatgtcgtcgtacaggttctgatcgtggaatttgcgcagcactacacgcaggaagggcggattgaattgagcgtatgggatgacgtgcgagtacacagagtagacagcttcgagagtctccgccgacgtagtcgggtctcgaatgatcgtggtcaaccatgagaatgaagtttcgatttcggcgacattcgattgcttggcgggatcgttcatctcgtcgaggtaggtggacaaggcttccaagcaagattcgcgatcctggtcggtttcacaacgcctgtatattcgatggtcaaggtgagctcgcgctaactcgagcagagcacaaaccctgcttacagccacaatttctgcctgatcaggtctcccaagccttcgccaacgttttcgacaccggtcccaaagacgtcatatcgttttctgtccgtgttgcgctgacactcagcagacatcatctgtacgatcaatccggccgacaatttcgcgagctcaaggtcttctgactcggtatattgtctgattcgtggagccaggtcgaggtcggcaagggcaccgtgaacagaggacgcgttgaaacccgtcactcggagcagtctgccggtgagtttcttcagacgagcttgatcggcggtactgaaaggcgatgagattcggtcaatttgaaagttacgacggcagagaagcacaaaacgacgttgctcactcgaacagcttgttcaacatctcacccaccttgccaaactcatcgggaagcttgggttcgggctcgccctcatccagatcgttgccacttagccacgagtgattcatctgctgccattcctggctgatctcgtcgaaagcgattaaaatgggaatgatccgatgaatagcttgatcaaagtaattgggtgcccatatcgggggaaggatgggaagttctgctgcacgtcccatgatccagatgtcgggctgctgtcgattcagaaagggggtgatggtagggaggtgagtgaggtccttgactagtctgactggctacacaaaaacagtgcagattcgtatgatttatataagtgagctgctaagctgtgctgcatgacacaggcgaattgtcaagacatgatgatcagtcccgtgatcggtgggttgtagcttatcctcaaaggtcctttcgcgtcgtctctgaacggaaagtttgattatttcttccctggacaagtcaaggggcgcttccatgtcggtaccgaaaacaagtggatcatcagagagattccgtgacgatgatcagcagttcagaagtcaaaagacaaggtttagagtttgacaatcagcaatcaaagaccgctcgctctagtcttggcacgagttgcatccgtgagcatgtgaccacatccagttgctcccgttctctgagcatagcttcgctcaccgccagtccgacaaccctagctatatcctcgacatcatcgatgtacccggatcgagagtgccctgctgttggtaatcgttcttgtcagccagccatagccagtatgcgattctaggaacatgacaagatccaccaaactgccaaggccgcgaccccgagcttaaatcgggtttcggtcccgctttgcagatcagatcacgtgagacggtcgagctatttgacaaatatcgaatcacccggccggacatttcatgtttcatgtttccgtacaaagcgaatcttttacagaattttccgatccaatttcctagcagcttattctcttggtctcttggacctcttgccagcaatgtcgactttcggaacgcgtgtactcggccggacgtcatcattgacgcgcatctttgatgcctcttgtctgggtggcataaatatcaatggtgtaggcgttgtcgaccctgctgtaaatggggaaaacgacctggtcggcattgacattgtaagtcgtgttgctgatgatagtaggagcgtcgaccatgccagcccggttgaagggaatctccttgatcacagccctaacattggtagccgtaaacctccagcgcctgtcaaaaccgagcaataaccaccgagatccgatatggaaactgtccgtcaaacgtccgtccgatcggtcgacggccgaggtcacctgttctcaagtaatcaagtccgacgtcaaattggtgtgctcgccgtgtactccgtgctagacccacgaaggaatggcagaaagacaaatggagttccgagcgcgtctgtcggtgctcgggacatcgcaagcgcgtccacgacgctgcccgagagcgacggcgtgttgtcggctcaatccgtttcaaacaccgttggacctcgtcggatctcctaatgaaggacgatcgagatgaaatgaagggcggttagttgcgctcgatactctcgcgttaattaatatacgttcagcttgactgatcggaattgaattcgtactaggttgccaagccaaacgttgccgccgcaaaggtaacccaaaacgatcgttctgatgcttcctggccaatcccgcatactagggatcacattcctttgtgcgacgataagatttccttatgcatcggtttcacctacgtggtgatcctttcacttattgcatgttacagatccgccaggcctcgtttgtactcgactgaaatgattataagagttaggacctgcttgctgccgcaagcattggtcgatagattctgatttctccgacttgtcatcacccagcctgcacaatcttttccccgttccattccgctcaatccgtgacgccaaataccatgcgcaccttctcctttatctctatcctaacgttgcttgcatatggacagcgaagtgagttgcgtatagttcctcgaggtctcgcagaacaactgctgacgaccaactactcagtcgcatcgttgccgttctttaccgagaattcgagtgaccccgattcgaagaaagctgcagctctccgagacatcgaaaagtgcactaaccgccaaggcaaagctctgtggcgacctggtagcaaagattacggactgcctcttatcaagcgagaggatgtcgtcacgataacttcagtgcaaggacagaactacccatactttgcgagactagccgccatggccgcttggtcgcaggtaagtccaccgccgcgaacgacataaatgttcgactcgtactaacgccgattctgttcctcgccaaagtttgcagtgccggatattcaggacatgttcacttccaaggacggcgcaagaaaagatcaagagtcgtattgcatttacgatgaccccgagatgtccaaagtcaggatctcgatcggcagtaacaggactgctgactatgcaaagtatccttcggtcgagtatactgatttgctcaacgagctcaagtcggttgaaaacacggggggttggccgacctactgggcttatctcctcggcaagaccttgaaagaaaagtggtatcccaaagagactcccgaagaccaggtcgcgattgacaaggtggaagaatatgccatcgcatactgtagtatcctgacgggcgaagaatgtgtggccacgggcacaaccgaacctcacgtcatcaaggaaggcgaagtcgagacgaaatgggcggacgaggtggtgcaccgggtcctaatgaggtccaagatcacggtcagttcggaacaccagctcgctgcgcgtcagctgccgggtactgatagattcaactcgaatagcctgtgatcgccatcgaacccgctgatgtcgggtcgaaaggcgtttgggccgtcagggacatgtccaatatcatcgattttgacctcaagtactggaatcctgcgggtggaaactacgtaaccgatgccacggcgagcttgcgagtggttcatgtcaagggcgctgagatcgaggggcccaacgatgggccgtggagtaagtttgtccgcaataagcagtagtcaggcaaagtaggtagtagagactaatgtagtaaatgtgacgatcgtacaccaaggcaaagctttgtgatctcataccttccagtggccatctactcttccgtcgaactttgtcacacaggctttgcacgcgtctggccctgcacttgactcacaactcgcacgttggaagccgtctgagaggaccaggctgccctaaggtcgaaccatgatgcatgatatggtttcgcgcgttacagtttcaagagtctctgattctgctggaaccctcaaagataaaaaagtccaagtcatggccatgagacatatcgacgtcagaggtcacagacagtggagtacgatgtacctgggaaggctcggtagagtgtaaagattcatagagttgaccgtttgttgacctggggcagatcgaattgtttccgagctgtgctcgcatcgagacgggagaaaaacagctttcatcgacctaaaggtctatagccctatatctacgtacagcaagtactcgacatccagcatggtcaagtcaacccaaacctcccgtcgacgatgtctcctgactcgtttctgagcttcttattcacctcaaatcgccctcgcaaatcgtcactgtaggtgactgcgacctagacgatcggccgctcgactaggaccggacgcttcaaacgctcctggccggtgaaagcgttcacccacaacaatcgagtctcgagagtgcaaaccatgtccaccctgaacgtctcgatcccggataattctccaatcatacagtactatccgtacgccgatggatctcaacagtccggttggaattcgagctatacgtcaggccgacgttgggcgagggatgtcattgccgaaggaacgtcataccatgtaacaagtttccctggagcttcggccactttgacattcgagggcaccgatatctgggtctggggacaaggcgatagcagcaactacgaagtcttgtgcgaccagacgatacagccggcgttgtcaggcacatacaccggtctcttggggtcgtgtaacgacctcgcatatggctctcatcaagtcgagctacgagtcacgggcaaccaggcgacaggtggatcgagcactaatcaagggatcctttttgatgggatgaccctgcaaaccgagttgggccctagctcgtaagcacgattgagcttgatcctcaagactctatcactcatgtcatctcgatcaacatcgtcgacagctcaaccgtaaccaatagcacagtgcaactagtcgatccgacttcgcaatggatgaatcccgatttttctacaccgcgaggagagtggttcacgtcgtcaacattcggtggaggaggtgagctggtcgaagagaacatcagcgacattgcagtctagcccgaactgatctccacgccgcaacgacgcagacaacacgaccgagtttacctattatcgggcaacatctgttaccctggactcgaccttgagctacgtcgtaccgaacaacactcgttttttctatgcctatggatcgatcgcctggaaccatcgacagtatgcggtctcgctggatgacggccaattcgtccagtatgtcatgcctagtagctggagcagcgtggatcagcttttgtgagtgagggtgggggcaggtggtccgggaagcacactgaaggcgacctcgttggtggacaggtactacactccattggaccctgcgacacctcacaacattacctttcaaaatctcggtgcgggcaccatgtggcagtttgacctccatcatgtcgtgctgtcgtccgtagatgagtgagtttaaacgaggtgtccacgtccactgtgcatgggtctcatggggttttcgcgatcaaggaacggcggagaatcaggttcgggacccaagtccaagatcggcgtgatcgtacgcgacgtcgcgcctgcaagatggccatgccagactgaccgatgcgaccgttcttgtgacaggtcggagtgattctggcatcgctggttattctaggaatgatcgcgggctggctcctgtggcggcgacgaaagcgtggaaaggctggatccggtcgaaccctgcccctgcataaacgtctacgagcagccctgcggccgtcgtcggtcatcgatccagatcatcgtgtggtcgatttgctgcagacggagtcgcatatggaatcgtcccgcagccgcagaagcgctcaggtggattggcctggccgtaagtcgcatcgacaagtcctggccctcatccttttggccggcactactgattggcagccgttttgcagccacacctttcccggctcctactcccgtaaatgcacgtcaagcatatacaccagcacatggccgatcgtcttcgataacatatggcgtcaagcccgacctggacccatttgccgattccaactttcatctgcggagcgtgcctcatgtcgaccccgaccagcggtcaatgtggacggcagacgacgatggcatgtcgacggtcgcctatactgacattggtgcctatggctcggaagcaaatgatcgagacagagatcacgatcacgacgacgacgatgatgacacgaaagcccgactatcgagaatctcgacgagatcgcaagacgtcgaaatgaccacgcaggcgcaggacgccggacgtctcatggctgctgatgacatgcagggtgtggttccaccgcagtacgatccctcctggcgacacgatcggttctcataaggaaaggcgcacagatgtcgaaactcttgtatccaaataggacgaagactcgctatcacaacattcatggttacaacttgttcagattaacttgcaatttcttcatttacaattcgctgaccggggctactagaacatctacaaatttacctcgcacgactttccttgagcccgttcaaaagtcgatgggtcctgactgtcgagacccacgccgttgccgatgaccagcacatgccagggtacggctcggacagtgtcgcccataagttcgacgacgatcctgtcaatcttgttgtgctgtccatgcgacgctttgatcgagcattcgatacgagaaccatcgcgcaaggtcgcacttgcgacaatgtccttggtcatggtcctggagacgaccacggtgaaacccttggacgagtcagtaatcttgtccaagacggtgtggccctcgttgccgataatcagcgcgtgatcttgacgaacaagtagcggcagggtcatgaaggtgtgcgtctcgctaacaaacttgccgcctgtaatctcccgaccgtcgagtaagtttgtccacgtgccagtgggaatgtagtagtccacatcctgttcgtcaaaaacgggagcgactagcaaagcgtctccgagcatgtactgattgtcaaccatccaagcgatgtggtcttcagggaattcgaggaacgtagcgcgcagcaaggggtgcccgagtttgacagcgccttcgatcgatagcgtggtcaaatacggctcgagtctgttcttgagcttcgtgaattttgacaagacgaccgacgactcgtcatcgaattgccaagggacccggtaagtctcggatccatggagacgcgaatgtgacgacaagagaccgaattgtacccatcgtttgctggaacgtggcgcgtaacgagtgtgagccagcatcgcgacgaacatgagcgcgaactcggtaacctactagatggcagcctcttgacccgtacccttgtacgtaggcttgtttttcccctcggccttgaacccgccaatatcgtgagcaaaatatccaaagccgctcaaacacaacgagagtccaccacgtatagtctctgccatgcctgtaaatgtctggtcgcagtcaccgccccagtgtaccggcaaagtctgtcccgaggccatagccgagcgtgcaaagagacaggcctcgctttcaccgcgttcctcggccagtacgtcccagaccgccttgttgtacagtgtcgtactaagtaggcgatcaatatgaacaatatgcgcgcaccgcctatggggatccacgacaaactcactactgattgtgcatggccctcggattgctcttgtcgtgatagacgacgccgttcgccgggatacgctcgccaaagtcggtcttgaaactgtcgaccccgagtctgacgagttgcctgagttgatcttgataccagctcgtagcgtcggggttggtaaaatcgacgaccgccatgccggcctgccagtcgtccgtctgccacgtttcgcccgtgatccgtctgatgaaatagccccgctcatctccctcggcaaacagtctggactcttggccaatgtagggattgatccagacgcaaaccttgaggccccgttggtggagacgctcaaggaaacctcgagggtcaggaaagtattcgggatcaaacttgaagttgcaccattcgtgagcaggcatccagaagcaatcaaagtggaagacgtgcagagggatatctcggtcctccatcccttggacgaattgcgtgaccgtctgttcgtcgtaggatgtgaggaacgatgtcgagagccagagaccgtaagaccagtcgggaggaagcggagggcgaccggttaggagggtgtatcgcgtgaggatctccttgggcgtggctccggcgatgatgtagaaacggatggtctcgccaggaacgctcgcttgaaccttgctcatgatatcggattgcacttcgaccgagacgtggtcggtatggtcaaaatagacgccatagccgcggttcgtcatgtagaatgcgacgttcttgtaggctgtacgaggtgagatatggtcagaaaagtatatcgctgatgatcagggacagctcacctgaagcgctgctagtcccaccgtcttcgttggaaagctcgatagtctggccattttttatgaatggaccgaatcgctctcccaaaccgtagacctacatgatcgacgttccatgacgtgatactggttgagccatcgaacgaaggccattcggctcgatttcgaacgcaccttttcgccgacaccgaggttcagagcgaccttcatataactctgccgacgtgagactggttctcggtggtacgggtcgctgatcgtcgtgacggcgttttccctgatggcgtccttgggcgaagcgttcttgtccaagacccacgagaggctgtccgctcggatctcggtcaatagcttggcctgtcggtcgcgctgctctgaaccaaagaaccggattccaaagttgcccttgtccagatccacgtcgactcgagattggtcgtcggtcgagtacaagcggacgtcggcgggtcggccctgcgcagacactggaccgaaagcgactcgactgccatctttttcctcgccgccatgtgggaacaacttgactcgaggttcggtctgggctggtctggctttgaaatgggagacctcgaggccgataatgccggcacacggcgagtggatcttggcggtcaacgtcggtttgttgagagagtcgccacggttcttgacgggtcgggtgtggaacaggactcggaggtcgtcggtttgaatcttgtttgatcctgatgtcgactttaacgccggtgctgccttgctcaacgacgggtagtatggacgttccagtccatcaaagtcgagtttgccgacttcctgtgctgagacgacgtcgacatcttctcgaccgtaccagaccccttcagtgaatcgcatcgtgtcaagttgacagtcgttgtggtcgtcggtttgggtgatgaacgacgaggggagtgtcgcatctgatcatggccaggcatggtaggcagactggggtcgttcttatatatcaaagtgtactctcactgaccacctttgaccgagccatctaccgacagatgacctgagagagacgacggccggacttttcccggaccatcccatcccatcccatcccatgccatgcatatggtcggtgttgcttcgaggcgatggatgtcaccgagaggatggcaagtcagcatcacgtgttgatctcaccgagtcggtcagatccgatgttcgtttgctggtcaacgtgtcactcgaaccccagacccgtaacaccaacacgtcctcttgacaagatctaccttgatccgtgatctgtaatcgtcaaagttgatcgtctttacttctcatcttgccgtgctctcgccgtcgaaattccgccaacatgtcctccgcctctttggtccacagggatcccaacactttgagcaactaccacgaatggaaaactagccacatcacggccgatctagtcatcgagtttgagcaacagagatgctcgggcaaggtcacactagccctgacaaggttggagaaaagtagcaagaagattgtcctggatactagctacctcgacgtcgaaggtgtcaaactcgctggcaagcaggtcacttgggacttgggtcagcgatcggaaccttacggtagtcccctcaccgtcgaggttcccgagtctctcactggcgacgtcgagctggagattcatgtcaaaaccacgaaagagtgcaccgcagtacagtggctctctccggatcagacgtcgaacaagaaacatccctacatgttctcgcaatgtcaagcgattcatgccagatctttgctaccttgtcaggatactccggtatgtttcgatcgggctttctcggaaaatcacccgctcacaacgatatctcgataggacgtgaaatccacctttacctttgccattcgatctcccctgcccgtgctcgcgagtggtcttcctaccggtaacaaggactaccaacccgggaaagacggcgcgtccggtacccttctctacacgttcgatcaatccatccctatgcccgtctacctctttgctctcgctagcggagacttggcttcggcagctatcggtccacgaagttgcgtacataccggacctgaagaacttctcgcttcccaatgggagtttgagccgaccgaaaaattcattcaggcggcagagaaaatcgtattcccctatgcctggacgcagtacaacgtcttggtactgcctccaagctttccttatggtcagtgcattagggcgacgagttgactgtcgggagctggtcgttgatgccggcgtttggtgtccttgcaggcgggatggaaaaccccatatttacgtttgcgacgccgaccctcatctcgggtgatcgtgaaaacatcgatgtcatcgcgcacgaactggcgcattcttggtccggaaacttggtcaccaactgcagctgggaacatttctggttgaacgaagggtggaccgtctacctcgagcgaaggattcaggcttccatccacggagaatctcaccgcgatttcagtgccatcatcggctggaaggcccttaccgatagtatcgaagggtacggagccgatcacgagtacaccaagttgatccccgacttgaaaggtcaggatcccgacgacgcgttctcgagcatcccttatgaaaaaggattcacttttctatactacctcgaaaagctcgtcggcaaggacaagtgggacacgttcattcctcactatttcacgacttttgctcaaaagtctttggattcgtacgaattcaaggccaacttgatcgactttttcgctcaagacgccgtcgctagcgatcagttgaaaagcgtcgactgggatacctggttctacaagcctggctatcctcccaagcctgatttcgatacgtccatggtcgacgtgtgctacgagctcgccgaccagtggcaatcattggacgccggtgaatccaaattcgagcccaacgcatccgacatttcatcctggactgccaaccagtcggtcgtctttctcgaaaaaatccaaacatggcaggcaccactcagcgtcgcattggtagaaaagatgggccaggtctactcgtacgcctcttccaaaaacgtcgaggtcgtcagtcgttacttgatcgtcggtctcaaagcgaggtgcgagagcgtctacgtgccgaccaccgagctgctggggagagtcggacgcatgaagtttgtccgtcctctctacagaaacttgcgcgaatgcgacgaaaagctggcccaagcaacgtttgaaaagtacaagcagttctaccatcccatctgcaaggacatggcgtacaaggacgtctacggaaagggtcgaggtggttgaggcctgatcgacactcgtataatacatgacatacgtatgacatgcattccatggcaaggattcttgacgaccagagtcttcgagcccggtcctcgagctgttccgacttccgactgcgagaccggtgatgagcagaagtcgtcgccagcatcctgtatctcttgcctgactacgcctcgactggatccttactccgaacagcccagtggcgtagtttcccactgtcggccggatccatgccgattgtcattctctttccgtcgtacctccgtttatacacggctttgacgttgctagacccatcgggatgggcatcggattagggcagagttcgagctataatcgccggagtcagacgacaatggctgtcgagggcgttctgcacgcactgagcgcggggatcttgctctataccgggctcgtcgaggtgagtttcggcacaacatcatcatcatcatcatcatctctcatctcagcgctgacttgtacgaacatgacagactagctgctcgcacacgagatcctgttcaaccccaagatgtcctcggcgagcgtgggcaaggtgacgtacatctttacgtgcatcttggtagggagcgggatcgtggctcacatagggtactgggcgtggaaagccggtgcagggactcgtaatacaactgtatctctatacacatcggcatggatagatatcatggactgcgggactgttccgccgggagggcgtgtggaggttcaggttgccaagggagcaatgtggatcccgcccgagtaccgcatgtcggggttgggctgatgcagcagggcggtgatctctgccctgtagcggttccagacccgtatgtcttggaacgtcatcgggcgaatctgcttaccgcacgttgatgagcgataggtgtgtagcatcgttcgccccgaggggactacgcaggaaagaaagtggatccgaggcaggtcgaccacattgaactaggccggagcgatccggatgacctgggctgaagaccggctcttctgcagacccgtctttgaagcttctatcttctttccttccggacgccaggggatgggacaggtcgtcttggtgcctttctagggcgacggatggatcgagtcccaatcgggcgtggtaggcgggaaccgatcgatacgaatccattgtcaatcctcgtccatagggttccaccgggtcagccctctcaaggggcatcggacctgaacacctttccctgcgctttcttctgcagcgcccttctcgttctcgagggagaatctttatgatggcccttccccccgtcttccgggtggttccgattgaagatggccagccccgcccctttccgttgttctcggcacaatttctgcgggacggtatctttcgactgacggtgggccttttcggccttcttcctttctttccgagcttgaacatattgttcgcgggtgtggtgtgggacctgagaggggggtcggtgaggcttacactgccatcccgtttagcaacctgtcgagcgtcctcgcggttatcaaactcgagcacgtagcgattaggtactaccccggtgggaccggcacgttggatggcggacttgtagtcgaacgccgcggcggggtcgatgagcgcgaggagtgcggggaggagggtgaggagggtagaaaggccgagcatggttcgttgacgtccagtgagcttcgagtgcgttcaggtcggtcggtcggtcaagggtataggtcgtcagaagcagagcggaaaagtgagagaaaacgagcgtggggtttcggctggatagccgggtggtagtcagcagatgagggttggcgatcgggatcgaggcaaggtcgatctttgtaaggaatgtcggtggcaaacgccgttatagattggcggctggccttgacaaggtggtggtgggaatgatagggcggttgttatacaaggagtagtagaggtgtgtgtcgtcgatgtttgtcgagttcgatcgcgatcggtcaggtccgagcgagcgaacaacaacaacaaacaacaaacgacttggaccctcaggcacaaaacacgtccatatcccacctagggaggagttggataaagtcccggaaagagaggggagcaatcgaaatcgccaccgccacgacgttccagcgagcgagcggcagcaagaggcaaggcaagataccctcgccaagatggaaagacgtcgaaaatgggtcaggtatgttttgcgtcctttcatagtagtagtactactctgctcaagtggcaagccgcctcagcgggttaatagaggagtcaagggccagatggagccgtacccgggcgcaaaaataggcaagttacgtgagtctcgagcgcaaagaacgcaaaaagaacactcagctcttgccaaggatcgaacttgggatctactccgtatttacgtgttgtaaaggagacgcagtaaccactttgccacaagagcgtcgttggatggcattcatatgcacattatatcaacgtctaacaaagggtcttggggccgaacgcggatgaaacggacaatgctttcaaacgctcacttcacgttatcgcgcgacccgaagcaaaaatggtcagaacaggttgtttcccaacatcatcgctgaccttgtagtttgctatcagctatcagtcagccagtctttcactggaacgacttgaatgaaataggtgatccagtcagctgtgcggtcgtactgaaatgatgttctcttcaaggtcgcaaggtcgagcctgatgaataccttgacatctatgacatgacccgctcagcatccgcgtttctcctcaaaaggtggaggtcgatcgaggggagaactttgagatcgaccgagcactttgatctggtttgatatcatgcaataatgacagaccgatgtcgtcttcataccccactctgatcccacctcacaacttcataccactcgaaccatctaatagctcgactccgagttgctcgtctaaaactgctcggcttcgctttccccaggttgtccctgatcagcagggccaccacctccttcctccgctcgaccacccatcgacgcctcgtatcgacatcccgcaacatgtcctgggacgtcaaggtcgtcaccgccccgtctagagattcagacctcgccctcgtcgtgacgtttgaacaggacaagtatttcatcaactgcggcgaggggactcaacgggtgtgcacacagcgaggtgtcgccttcaagaaattggatgcgatcttgttgaccaatagtggtagcgaggtggtcgcgggactaccgggggtgttgatgtcggcggcagattcaggtataccggggatcaaaatcgccgggccagaggacgctctacagtacctggtctcgtgcaggacgtttgtacagaggtgagtgcgaggtgaatcgaggttggtgaatccaggttggttggactgacgatcgacaaattcgcccagggagaaattctccgtacaatggctaccacacccggaagacacgtccaaaccgatctatcacccgaatcatctctccatccgagccatccccctctcgtccacccaggcgaccccgtctttccctacaccgcgtcaggactgggaatggcgagacatcgacctcaagctcgagggtctctctgcggaccagctggccgggtggaggaggaccgtcctggcggacatgttcaaaaaggaaggcaacctttccggtcaagcaccaggtaccaacaccaacgatacctcgccggccaacgatctcgtccccgctcccggtgctagcaaagtcatcaacccgcccttgccttcaacctcggccacacccgatgggcacgtcccgaaacctatccggcagtaccatcccgcccgtatgcacatcccgcaacccatccctcatccatcctcggacccgacggcgtcgaacaacgacccggatatgaggtacgcgtacatcctgcaagcaccccccgtcagagggaaattcgacatcaaaaaggccgaggcgctaggcgtgcccaagggttcgatcaggggcaagttggcccaggggggttcgatcgaggtggaagatgggaacggtggtaagcgggtgatcaagtcggaggacgttctcggggcaacgaaggatggcggcgcctttatcatggtagacatcactgcggcgcatctccctcgactgttagaggacccgacgttcagagagtatcaactggtaaacggcgcggaaaagccggggaaaaaggcggggctcgtcgtccatcggatcacggacgaggtgatgagggacgaacggtaccaagcatgggccaaggcgtttggcaaggatacacctgtgggtcccgctgttcgttcgtttggtttcctcgccgactgacctgcgcttgctcctgtcctcttagcacctcgtggccaacatcgaccgatggacagataccgtgacgttcacctcgagcgcgagaaacctgctcaaactcagcttgctggatgaccaattgttccgaccgatccgggtggagaatatgggagaagacgatggactcgccgtcgagccgtttatcaatatcaaaccgtatcaccagactcgtatattcccacccggtcaacctaccatcggaacgctgcttgagggcgacccgggttacccagcagagaccgagagagaggcggcaaaggagctggtcatgcaggagatgccagaatatgctcgactggtacaggaagcccgggcaaagacaagggaggtcgatgaggacatggtcagcgaggacgactacgggatggtcgtcacgccgctagggacgggtagtgccatc
